(19) United States
(12) Patent Application Publication
(10) Pub. No.: US 2009/0241218 A1
(43) Pub. Date: Sep. 24, 2009

(54) PLANTS HAVING ENHANCED YIELD-RELATED TRAITS AND A METHOD FOR MAKING THE SAME

(75) Inventors: Valerie Frankard, Waterloo (BE); Vladimir Mironov, Gent (BE); Christophe Reuzeau, Tocan Saint Apre (FR)

Correspondence Address: CONNOLLY BOVE LODGE & HUTZ, LLP, P O BOX 2207, WILMINGTON, DE, 19899, US

(73) Assignee: CropDesign N.V., Zwijnaarde (BE)

(21) Appl. No.: 12/302,295

(22) PCT Filed: May 30, 2007
(86) PCT No.: PCT/EP2007/055238

§ 371 Date: Nov. 25, 2008

Related U.S. Application Data
(60) Provisional application No. 60/810,572, filed on Jun. 2, 2006.
(60) Provisional application No. 60/810,749, filed on Jun. 2, 2006.
(60) Provisional application No. 60/810,759, filed on Jun. 2, 2006.
(60) Provisional application No. 60/813,514, filed on Jun. 14, 2006.
(60) Provisional application No. 60/830,551, filed on Jul. 13, 2006.
(60) Provisional application No. 60/831,642, filed on Jul. 18, 2006.
(60) Provisional application No. 60/835,303, filed on Aug. 3, 2006.

(30) Foreign Application Priority Data
May 30, 2006 (EP) 06114726.0
May 30, 2006 (EP) 06114735.1
May 31, 2006 (EP) 06114758.3
Jun. 8, 2006 (EP) 06115142.9
Jun. 30, 2006 (EP) 06116490.1
Jul. 12, 2006 (EP) 06117060.1
Jul. 28, 2006 (EP) 06118060

(51) Int. Cl. C12N 15/82

(52) U.S. Cl. 800/278

(57) ABSTRACT

The present invention relates generally to the field of molecular biology and concerns a method for improving various plant growth characteristics by modulating expression in a plant of a nucleic acid encoding a GRP (Growth-Related Protein). The present invention also concerns plants having modulated expression of a nucleic acid encoding a GRP, which plants have improved growth characteristics relative to corresponding wild type plants or other control plants. The invention also provides constructs useful in the methods of the invention. The GRP may be one of the following: Extensin Receptor-Like Kinase (ERLK), F-Box WD40 (FBXW) polypeptide, RAN-Binding Protein (RANBP), Golden2-like Transcription Factor (GLK), REV delta homeodomain leucine zipper domain polypeptide, CLE protein, and Seed Yield Regulator (SYR) protein.

[0001] The present invention relates generally to the field of molecular biology and concerns a method for improving various plant growth characteristics by modulating expression in a plant of a nucleic acid encoding a GRP (Growth Related Protein). The present invention also concerns plants having modulated expression of a nucleic acid encoding a GRP, which plants have improved growth characteristics relative to corresponding wild type plants or other control plants. The invention also provides constructs useful in the methods of the invention.

[0002] The ever-increasing world population and the dwindling supply of arable land available for agriculture fuels research towards increasing the efficiency of agriculture. Conventional means for crop and horticultural improvements utilise selective breeding techniques to identify plants having desirable characteristics. However, such selective breeding techniques have several drawbacks, namely that these techniques are typically labour intensive and result in plants that often contain heterogeneous genetic components that may not always result in the desirable trait being passed on from parent plants. Advances in molecular biology have allowed mankind to modify the germplasm of animals and plants. Genetic engineering of plants entails the isolation and manipulation of genetic material (typically in the form of DNA or RNA) and the subsequent introduction of that genetic material into a plant. Such technology has the capacity to deliver crops or plants having various improved economic, agronomic or horticultural traits.

[0003] A trait of particular economic interest is increased yield. Yield is normally defined as the measurable produce of economic value from a crop. This may be defined in terms of quantity and/or quality. Yield is directly dependent on several factors, for example, the number and size of the organs, plant architecture (for example, the number of branches), seed production, leaf senescence and more. Root development, nutrient uptake, stress tolerance and early vigour may also be important factors in determining yield. Optimizing the above-mentioned factors may therefore contribute to increasing crop yield.

[0004] Seed yield is a particularly important trait, since the seeds of many plants are important for human and animal nutrition. Crops such as corn, rice, wheat, canola and soybean account for over half the total human caloric intake, whether through direct consumption of the seeds themselves or through consumption of meat products raised on processed seeds. They are also a source of sugars, oils and many kinds of metabolites used in industrial processes. Seeds contain an embryo (the source of new shoots and roots) and an endosperm (the source of nutrients for embryo growth during germination and during early growth of seedlings). The development of a seed involves many genes, and requires the transfer of metabolites from the roots, leaves and stems into the growing seed. The endosperm, in particular, assimilates the metabolic precursors of carbohydrates, oils and proteins and synthesizes them into storage macromolecules to fill out the grain.

[0005] Another important trait for many crops is early vigour. Improving early vigour is an important objective of modern rice breeding programs in both temperate and tropical rice cultivars. Long roots are important for proper soil anchorage in water-seeded rice. Where rice is sown directly into flooded fields, and where plants must emerge rapidly through water, longer shoots are associated with vigour. Where drill-seeding is practiced, longer mesocotyls and coleoptiles are important for good seedling emergence. The ability to engineer early vigour into plants would be of great importance in agriculture. For example, poor early vigor has been a limitation to the introduction of maize (Zea mays L.) hybrids based on Corn Belt germplasm in the European Atlantic.

[0006] A further important trait is that of improved abiotic stress tolerance. Abiotic stress is a primary cause of crop loss worldwide, reducing average yields for most major crop plants by more than 50% (Wang et al., Planta (2003) 218: 1-14). Abiotic stresses may be caused by drought, salinity, extremes of temperature, chemical toxicity and oxidative stress. The ability to improve plant tolerance to abiotic stress would be of great economic advantage to farmers worldwide and would allow for the cultivation of crops during adverse conditions and in territories where cultivation of crops may not otherwise be possible.

[0007] Crop yield may therefore be increased by optimising one of the above-mentioned factors.

[0008] Depending on the end use, the modification of certain yield traits may be favoured over others. For example for applications such as forage or wood production, or bio-fuel resource, an increase in the vegetative parts of a plant may be desirable, and for applications such as flour, starch or oil production, an increase in seed parameters may be particularly desirable. Even amongst the seed parameters, some may be favoured over others, depending on the application. Various mechanisms may contribute to increasing seed yield, whether that is in the form of increased seed size or increased seed number.

[0009] One approach to increasing yield (seed yield and/or biomass) in plants may be through modification of the inherent growth mechanisms of a plant, such as the cell cycle or various signalling pathways involved in plant growth or in defense mechanisms.

[0010] It has now been found that various growth characteristics may be improved in plants by modulating expression in a plant of a nucleic acid encoding a GRP (Growth Related Protein Of Interest) in a plant. The GRP may be one of the following: Extensin Receptor-Like Kinase (ERLK), F-Box WD40 (FBXW) polypeptide, RAN-Binding Protein (RANBP), Golden2-like Transcription Factor (GLK), REV delta homeodomain leucine zipper domain polypepetide, CLE protein, and Seed Yield Regulator (SYR) protein.

### BACKGROUND

### Extensin Receptor-Like Kinase

[0011] Receptor like kinases (RLKs) are involved in transmission of extracellular signals into the cell. The RLK proteins have a modular structure, starting from the N-terminus with a secretion signal that gets processed, an extracellular domain, a single transmembrane domain and a cytoplasmic kinase domain. Animal receptor-like kinases mostly have tyrosine kinase activity, whereas plant RLKs usually have Ser/Thr kinase specificity, or may sometimes have a dual specificity. In animals, most of the RLKs act as growth factor receptors, whereas plant receptor like kinases may function in various processes, including development, hormone perception or pathogen responses. An overview of developmental functions of plant receptor like kinases such as meristem development, pollen-pistil interactions, hormone signalling, gametophyte development, cell morphogenesis and differentiation, organ shape, organ abscission and somatic embryogenesis is given by Becraft (Annu. Rev. Cell Dev. Biol., 18, 163-192, 2002).

[0012] Alternatively, receptor-like kinases may be grouped according to the structure of their extracellular or intracellular domains (Shiu and Bleecker, Proc. Natl. Acad. Sci. USA 98, 10763-10768, 2001). An overview is given in FIG. 1. PERK RLKs and ERLKs have an extracellular domain that is rich in proline and that has motifs typical for extensins and hydroxyproline rich cell wall proteins. Extensins are a group of hydroxyproline rich glycoproteins found in plant cell walls. They are usually rich in hydroxyproline (Hyp), serine and combinations of Val, Tyr, His and Lys. Typical motifs in extensin proteins is the SPx motif, wherein x represents the number of (hydrxy)proline repeats, usually 2, 3, 4 or more. Extensins can account for up to 20% of the dry weight of the cell wall. They are highly glycosylated, possibly reflecting their interactions with cell-wall carbohydrates. Amongst their functions is cell wall strengthening in response to mechanical stress (e.g., during attack by pests, plant-bending in the wind, etc.). Extensin motifs are also found in the small group of extensin receptor like kinases, exemplified by the Arabidopsis At5g56890 gene. Shiu and Bleeker (2001) identified 5 family members in Arabidopsis; various orthologues were found in rice (Shiu et al. Plant Cell 16, 1220-1234, 2004) and in other species. Extensin RLKs have not been characterised yet.

### F-Box WD40 Polypeptide (FBXW)

[0013] Plants have to adjust their metabolism to external and internal stimuli to ensure an optimal growth. Levels of regulatory proteins involved in these cellular processes are often controlled by proteolytic mechanisms. Among the most important selective protein degradation pathways in this respect is the ubiquitin-dependent proteolytic pathway. This pathway is conserved among plants, animals and yeast, and it controls the degradation of misfolded polypeptides and of short-lived proteins. Among the latter are important regulatory proteins regulating processes like defence and stress responses, cell cycle progression or signal transduction. Proteins destined to be degraded are covalently labelled with several ubiquitin units. The ubiquitinated protein is subsequently recognised by the 26S proteasome that degrades the target protein but recycles the ubiquitin monomers. The selection and subsequent ubiquitination of a target protein occurs in different steps. Three classes of proteins are involved that have been named E1 to E3, based on their sequential action. The E1 enzyme, also known as the ubiquitin-activating enzyme, “activates” a free ubiquitin molecule at the expense of an ATP and complexes the ubiquitin in a thioester linkage. Next, the activated ubiquitin molecule is transferred from the E1 enzyme to a cysteine of an ubiquitin-conjugating enzyme E2. This E2 enzyme normally is associated with an E3 enzyme called ubiquitin protein ligase. The ubiquitin ligase catalyses the transfer of ubiquitin from the ubiquitin conjugating enzyme to the target protein, which ultimately gets labelled with a poly-ubiquitin chain. The complex of E2 and E3 enzymes determines the specificity for the protein to be ubiquitinated. Whereas in different organisms one or only a few E1 enzymes are present, several E2 species exist that can associate with several E3 enzymes. The ubiquitin protein ligase itself is also a complex of different proteins. To date, five different types of E3 enzymes are known. Among these, the SCF complex plays a prominent role in regulatory processes (Ciechanover (1998) EMBO J. 17: 7151-7160; Hershko and Ciechanover (1998) Annu. Rev. Biochem. 67: 425-479). The complex consists of four subunits: cdc53/cullin, Skp1, Rbxl and an F-box protein. The Skp1 protein, together with cullin and Rbx1 forms the core ligase unit of the SCF complex. Within this complex, Rbxl is responsible for binding the E2 enzyme loaded with an activated ubiquitin. F-box proteins contain N-terminally a degenerate motif of 40 to 50 amino acids, known as the F-box, named after the human cyclin F. This F-box protein is responsible for the association with the Skp1 subunit of the SCF complex. At the C-terminus, a variable protein interaction domain determines the binding of target protein. One such protein interaction domain is a WD40 repeats domain.

[0014] In Arabidopsis, F-box proteins represent one of the largest superfamilies found so far in plants, compared to other organisms (Gagne et al. (2002) Proc Natl Acad Science 99: 11519-11524; Kuroda et al. (2002) Plant Cell Physiol 43(10): 1073-85). However, only two F-box proteins contain a WD40 repeats domain, whereas many WD40 repeats domains are found in F-box proteins of other organisms. WD40 repeats (also known as beta-transducin repeats) are short ˜40 amino acid motifs, often terminating in a Trp-Asp (W-D) dipeptide. WD40 repeats containing proteins (or WD40 proteins) have 4 to 16 repeating units (which collectively for the WD40 domain), all of which are thought to form a circularised beta-propeller structure. The underlying common function of all WD40 proteins is coordinating multi-protein complex assemblies, where the repeating units serve as a rigid scaffold for protein interactions. The specificity of the proteins is determined by the sequences outside the repeats themselves.

[0015] Published European patent application EP 1033405 provides for a DNA sequence (SEQ ID NO: 39903) from Arabidopsis thaliana encoding a partial FBXW polypeptide (N-terminal amino acid sequence, around 350 nucleotides long).

### RAN-Binding Protein (RANBP)

[0016] Ran is a small signalling GTPase (GTP binding protein), which is involved in nucleocytoplasmic transport. Ran binding proteins in Arabidopsis thaliana, At-RanBP1a, At-RanBP1b, AtRanbp1c have been reported to interact with the GTP-bound forms of the Ran1, Ran2 and Ran3 proteins of Arabidopsis thaliana (Haizel T, Merkle T, Pay A, Fejes E, Nagy F. Characterization of proteins that interact with the GTP-bound form of the regulatory GTPase Ran in Arabidopsis. Plant J. 1997 January; 11(1):93-103). All RanBP1 proteins contain an approximately 150 amino acid residue Ran binding domain. Ran BP1 binds directly to RanGTP with high affinity. This domain stabilises the GTP-bound form of Ran (the Ras-like nuclear small GTPase).

[0017] International Patent application WO 02/18538 describes transgenic plants having disturbed RAN/Ran-binding protein-mediated cellular processes; this is reported to give plants increased yield and biomass.

### GOLDEN2-Like (GLK) Transcription Factor

[0018] In plants, two types of photosynthetic cycles may occur: most common is the Calvin cycle of C3 plants, wherein 3-phosphoglycerate is the first stable product and ribulose bisphosphate is the CO₂ receptor. The second cycle is the Hatch-Smack pathway in C4 plants, in which oxaloacetate is the first stable product and phosphoenolpyruvate is the CO₂ acceptor. In C3 grasses, only the mesophyl cells are photosynthetic, whereas in C4 plants both bundle sheet and mesophyl cells are photosynthetic. C4 plants exhibit compartmentalised photosynthesis with the mesophyl cells performing carbon fixation via phosphoenolpyruvate carboxylase, pyruvate phosphate dikinase and malate dehydrogenase, and shuttling the malate to the bundle sheet cells, in which the malate is decarboxylated to pyruvate, the released carbon is then further processed in the Calvin cycle. As a consequence, three types of chloroplasts are present in C4 plants: typical chloroplasts of the C3 plant exist in certain tissues and at certain developmental stages, while in the bundle sheath and in the mesophyl cells morphologically distinct chloroplasts are present. The genesis of chloroplasts in maize requires the involvement of two transcriptional regulators: Golden2 (G2) and Golden2-like (GLK) (Rossini et al., Plant Cell 13,1231-1244, 2001).

[0019] Transcription factors are usually defined as proteins that show sequence-specific DNA binding and that are capable of activating and/or repressing transcription. The Arabidopsis genome codes for at least 1533 transcriptional regulators, which account for ˜5.9% of its estimated total number of genes (Riechmann et al., Science 290, 2105-2109, 2000). The maize GOLDEN2 (G2) gene is a representative of the group of GARP transcription factors defined by, besides GOLDEN2, the Arabidopsis Accepting Response Regulator-B (ARR-B) and Psrl from Chlamydomonas. All GLK proteins classify as members of the GARP family. GLK genes are monophyletic and gene duplications have occurred independently in monocotyledonous and dicotyledonous plants. GLK proteins typically comprise the GARP DNA binding domain and a C-terminal GOLDEN2 box. The Arabidopsis GLK proteins act redundantly in the regulation of chloroplast development (Fitter et al., Plant J. 31, 713-727, 2002). Furthermore, the gene function is conserved between the moss Physcomitrella patens and Arabidopsis thaliana, indicating that GLK-mediated regulation of chloroplast development is an ancient regulatory mechanism among plants (Yasumura et al., Plant Cell 17, 1894-1907, 2005). In the case of G2, three of the four defining features of most transcription factors have been verified experimentally in heterologous systems. G2 is nuclear localized (Hall et al., 1998), is able to transactivate reporter gene expression, and can both homo-dimerize and heterodimerize with ZmGLK1 (Rossini et al., 2001).

### REV Delta (Δ) Homeodomain Leucine Zipper Domain (REV ΔHDZip/START)

[0020] The present invention concerns increasing yield in plants using a particular type of transcription factor. Transcription factor polypeptides are usually defined as proteins that show sequence-specific DNA binding affinity and that are capable of activating and/or repressing transcription. Homeodomain leucine zipper (HDZip) polypeptides constitute a family of transcription factors characterized by the presence of a DNA-binding domain (homeodomain, HD) and an adjacent leucine zipper (Zip) motif. The homeodomain usually consists of approximately 60 conserved amino acid residues that form a helix1-loop-helix2-turn-helix3 that binds DNA. This DNA binding site is usually pseudopalindromic. The leucine zipper, adjacent to the C-terminal end of the homeodomain (in some instances, overlapping by a few amino acids), consists of several amino acid heptad repeats (at least four) in which usually a leucine (occasionally a valine or an isoleucine) appears every seventh amino acid. The leucine zipper is important for protein dimerisation. This dimerisation is a prerequisite for DNA binding (Sessa et al. (1993) EMBO J. 12(9): 3507-3517), and may proceed between two identical HDZip polypeptides (homodimer) or between two different HDZip polypeptides (heterodimer).

[0021] Homeodomain encoding genes are present in all eucaryotes, and constitute a gene family of at least 89 members in Arabidopsis thaliana. The leucine zipper is also found by itself in polypeptides from eucaryotes other than plants. However, the simultaneous presence of both a homeodomain and a leucine zipper comprised within the same polypeptide is plant-specific (found in at least 47 out of the 89 members in Arabidopsis), and has been encountered in moss in addition to vascular plants (Sakakibara et al. (2001) Mol Biol Evol 18(4): 491-502).

[0022] The Arabidopsis HDZip polypeptides have been classified into four different classes, HDZip I to IV, based on sequence similarity criteria (Sessa et al. (1994) In: Puigdomene P, Coruzzi G (ed), Springer, Berlin Heidelberg New York, pp 411-426). In Arabidopsis thaliana, there are at least five class III HDZip polypeptides (REVOLUTA (REV/IFL), PHABULOSA (PHB), PHAVOLUTA (PHV), CORONA (CNA/AtHB15) and AtHB8), all typically quite large (more than 800 amino acids). Similarly, in Oryza sativa, at least 5 class III HDZip polypeptides have been identified.

[0023] In addition to the homeodomain and the leucine zipper, class III HDZip polypeptides also comprise C-terminal to the leucine zipper a START (Teroidogenic Acute Regulatory (STAR) related lipid Transfer) domain for lipid/sterol binding and an extensive C-terminal region (CTR, more than half of the polypeptide length) of unknown function (Schrick et al. (2004) Genome Biology 5: R41). Furthermore, a complementary site for microRNA (MIR165/166) is found within the transcript region coding for the START domain of mRNA transcripts coding for class III HDZip polypeptides, for regulation via miRNA-mediated transcript cleavage (Williams et al. (2005) Development 132: 3657-3668).

[0024] In Arabidopsis thaliana, REV, PHB and PHV polypeptides have been shown to be involved in formation and function of shoot apical and axillary meristems, patterning of three dimensional structures (such as embryos or leaves), and vascular development (differentiation of lignified conducting and support tissues). In Arabidopsis thaliana, phylogenetic analysis reveals that these three closely related class III HDZip polypeptides form the REV clade, the two remaining class III HDZip polypeptides (CNA and AtHB8) belonging to the CNA clade (Floyd et al. (2006) Genetics 173: 373-388). When combining rice and Arabidopsis genes in a phylogenetic analysis, two rice class III HDZip polypeptides cluster with REV polypeptide, the OsHoxl0 and OsREV polypeptides.

[0025] Loss-of-function phb, phv, cna and athb8 Arabidopsis thaliana mutants are aphenotypic (Baima et al. (2001) Plant Physiol 126: 643-655; Prigge et al. (2005) Plant Cell 17: 61-76), but rev mutants form defective lateral and floral meristems and develop aberrant stem vasculature as well as curly (revolute) leaves (Otsuga et al. (2001) Plant J. 25, 223-236; Talbert et al. (1995) Development 121: 2723-2735).

[0026] The dominant alleles rolled leaf1 (rld1) in corn (Juarez et al. (2004) Nature 428: 84-88), phb-d and phv-d in Arabidopsis (McConnell et al. (2001) Nature 411: 709-713), and rev-d in Arabidopsis (Emery et al. (2003) Curr Biol 13: 1768-1774) present similar mutant phenotypes (rolled leaves), due to a nucleotide substitution in the sequence spanning the MIR165/166 binding site (in the START domain).

[0027] In granted U.S. Pat. No. 7,056,739 (and corresponding international patent application WO01/33944), are described plants and plant cells transformed with a transgene comprising an Arabidopsis thaliana REV nucleic acid sequence encoding a REV polypeptide represented by SEQ ID NO: 2 (of the granted patent). The transgene is reported to further comprise a heterologous promoter operably linked to a nucleic acid sequence encoding the polypeptide of SEQ ID NO: 2. Transgenic Arabidopsis plants overexpressing the REV nucleic acid sequence by using the CaMV promoter, presented increased leaf, stem and seed size. Partial class III HDZip genomic and cDNA 5′ terminal sequences from tomato, rice, maize and barley are provided. Examples of vectors designed to reduce the expression of endogenous Arabidopsis, rice and corn class III HDZip polypeptides in respectively rice and corn are described, to reproduce the rev loss-of-function phenotype.

[0028] In international patent application WO2004/063379, are provided nucleic acid sequences of two corn class III HDZip polypeptides orthologous to the Arabidopsis REV polypeptide. A method to modulate the level of class III HDZip polypeptides by inhibiting expression of the mRNA transcripts in the plant cell is described.

[0029] In a number of international and US patent applications deposited by Mendel Biotechnology, Inc., the Arabidopsis REV polypeptide has as internal reference G438. Reduced REVOLUTA activity after T-DNA insertion into the REV locus resulted in transgenic Arabidopsis plants with reduced branching and reduced lignin content, whereas increased REVOLUTA activity (using the viral CaMV promoter) resulted in transgenic Arabidopsis plants of which around half developed slightly larger flatter leaves than wild type plants at late stages.

### CLE-Like Polypeptide

[0030] Although cell to cell communication in plants occurs mostly through the phytohormones, such as auxin, cytokinin, abscisic acid, brassinostroids, giberellic acid, ethylene, peptide hormones are now recognised as important mediators of signalling events. The group of peptide hormones includes for example systemin, phytosulfokines, ENOD40, RALF, CLAVATA3, SCR peptides and POLARIS.

[0031] CLE-like polypeptides form a family of polypeptides that encompass and share homology with the Arabidopsis CLAVATA3 and maize ESR polypeptides. These polypeptides are postulated to be involved as ligands in signalling events.

[0032] The root and aerial parts of a plant are derived from the activity of respectively the root apical meristem (RAM) and the shoot apical meristem (SAM). These structures contain pluripotent cells that allow the production of all plant cell types and organs. Within the SAM, a balance exists between the division of the stem cells in the central zone and the differentiating cells in the peripheral zone, though the cell in the central zone divide slower than in the peripheral zone. CLAVATA3 (CLV3) is a member of the CLV3/ESR (CLE) ligand gene family and is secreted by the stem cells of the SAM thereby activating the CLAVATA1-CLAVATA2 receptor dimer and leading to restricted expression of the WUSCHEL (WUS) gene. WUS is a homeodomain transcription factor and promotes stem cell formation; it is required to maintain the stem cell population. CLV3 on the other hand is required to prevent uncontrolled proliferation of stem cells. CLV3 and WUS thus form a feedback loop that controls the number of stem cells and the organisation of the SAM. wus mutants fail to develop a shoot apical meristem, whereas c/v3 mutants develop a greatly enlarged shoot apical meristem.

[0033] Another member of the CLE ligand gene family is CLE2, which may function like CLV3 as secreted signalling molecule acting in diverse pathways during growth and development. CLE2 and other CLE family members were first characterised by Cock and McCormick (Plant Physiol. 126, 939-942, 2001). All CLE family members are short polypeptides (around 7 to 9 kDa) with hydrophobic N-terminal sequence (postulated signal peptides or signal anchors). The majority of the predicted mature polypeptides are highly basic (average pl 9.49±1.57) and hydrophilic throughout their length with a conserved region at or near the C-terminal end. This conserved region may be involved in protein-protein interactions. It is postulated that members of the CLE family, such as CLV3 and CLE2, are processed by a protease into a short peptide that is secreted. Although the CLE proteins share an overall resemblance in length, charge, and hydrophilicity, at the amino acid sequence level they are highly divergent. CLE2 was reported to be induced by NO₃⁻ addition (Scheible et al., Plant Physiol. 136, 2483-2499, 2004). Further functional characterisation (Strabala et al., Plant Physiol. 140, 1331-1344, 2006) revealed that CLE2 overexpression in Arabidopsis resulted in dwarfed plants with a strong delay in flowering time (approximately 40 days vs 20 days for control plants), but with longer roots compared to the controls. Overexpression of CLE2 also mimicked a wus phenotype. A similar phenotype as for CLE2 was observed for CLE3, CLE5, CLE6 and CLE7. These proteins are also structurally related. However, no phenotypic information is available to date on cle2 mutants or on downregulation of CLE2.

[0034] WO 01/96582 discloses the use of ligand-like proteins (LLPs) or functional fragments thereof for modulating plant phenotype or architecture. Preferred LLPs or fragments comprise the amino acid motif XRXXXXGXXXXHX (wherein X may be any amino acid), more preferred LLPs of fragments comprise the amino acid motif KRXXXXGXXPXHX. The document also describes that ectopic expression of various LLPs results in sterile transgenic plants, or at best in plants with reduced fertility. Also antisense expression of an LLP resulted in a transgenic plant with reduced fertility (greatly reduced number of seed per silique).

[0035] WO 03/093450 discloses the use of CLAVATA3-like peptides for modulating cell division, differentiation and development in plants, in particular for modulating meristem development. It was postulated that decreased activity of the CLV3-like peptide might result in generation of additional leaves before flowering begins, thereby providing plants having greater energy production and thus increasing yield, or in an increased number of seed-bearing carpels, or in the generation of a thicker stem, or in an alteration of the fruit of the plants. However, only hypothetical examples were provided with respect to downregulation of CLV3 expression, no real experimental data were given. Furthermore, the disclosed CLV3-like peptides fall within the class of LLPs described in WO 01/96582, since they comprise the motif XRXXXXGXXXXHX, for which it was shown that downregulated expression resulted in plants with reduced fertility.

[0036] Similarly, when a CLE-like protein from the plant parasitic nematode Heterodera glycines was overexpressed in Arabidopsis, the transgenic plants produced flowers that did not open or lacked the central gynoecium, and the root system was stunted.

[0037] The problem thus remains how CLE-like polypeptides, such as LLPs or CLV3-like, can be used for increasing yield related traits.

### Seed Yield Regulator

[0038] SYR is a new protein that hitherto has not been characterised. SYR shows some homology (around 48% sequence identity on DNA level, around 45% at protein level) to an Arabidopsis protein named ARGOS (Hu et al., Plant Cell 15, 1951-1961, 2003; US 2005/0108793). Hu et al. postulated that ARGOS is a protein of unique function and is encoded by a single gene. The major phenotypes of ARGOS overexpression in Arabidopsis are increased leafy biomass and delayed flowering. In contrast, overexpression of SYR in rice primarily increases seed yield, whereas the leafy biomass and flowering time are not obviously affected.

### SUMMARY OF THE INVENTION

[0039] Surprisingly, it has now been found that modulating expression in a plant of a nucleic acid encoding an extensin receptor-like kinase (ERLK) or a part thereof comprising at least the kinase domain and the transmembrane domain, gives plants having enhanced yield-related traits relative to control plants.

[0040] Therefore, the invention provides a method for enhancing yield-related traits in plants relative to control plants, comprising modulating expression in a plant of a nucleic acid encoding an ERLK protein, or a part thereof.

[0041] Surprisingly, it has now also been found that increasing expression in a plant of a nucleic acid encoding an FBXW polypeptide gives plants having increased yield relative to suitable control plants. Therefore, according to another embodiment of the invention there is provided a method for increasing yield in plants relative to suitable control plants, comprising increasing expression in a plant of a nucleic acid encoding an FBXW polypeptide.

[0042] Upon investigating the use of RAN-binding proteins to enhance yield-related traits, the inventors found the choice of promoter to be an important consideration. They found that expressing RAN-binding proteins in a (rice) plant under the control of a constitute promoter did not have any effect on yield-related phenotypes. They surprisingly found that plant yield could successfully be increased by expressing RAN-binding proteins in a plant under the control of a seed-specific promoter, particularly an endosperm-specific promoter.

[0043] The present invention therefore also provides a method for enhancing yield-related traits in plants relative to control plants, comprising preferentially modulating expression in plant seed or seed parts of a nucleic acid encoding a RANBP.

[0044] It has furthermore been found that modulating expression in a plant of a nucleic acid encoding a Golden2-like (GLK) protein gives plants having enhanced yield-related traits relative to control plants.

[0045] Therefore, in yet another embodiment of the invention there is provided a method for enhancing yield-related traits in plants relative to control plants, comprising modulating expression in a plant of a nucleic acid encoding a GLK protein, or a part thereof.

[0046] It has also surprisingly been found that reducing the expression in a plant of an endogenous REV gene using a REV delta homeodomain leucine zipper domain (HDZip) /STeroidogenic Acute Regulatory (STAR) related lipid Transfer domain (START) nucleic acid sequence gives plants having increased yield relative to control plants. The present invention therefore provides in another embodiment methods for increasing yield in plants relative to control plants, by reducing the expression in a plant of an endogenous REV gene using a REV ΔHDZip/START nucleic acid sequence.

[0047] It has also been found that modulating expression in a plant of a nucleic acid encoding a CLE-like polypeptide gives plants having enhanced yield-related traits relative to control plants.

[0048] Therefore, the invention provides in a further embodiment a method for enhancing yield-related traits in plants relative to control plants, comprising modulating expression in a plant of a nucleic acid encoding a CLE-like polypeptide, or a part thereof.

[0049] Surprisingly, it has now been found that modulating expression in a plant of a nucleic acid encoding a Seed Yield Regulator protein (hereafter named SYR) gives plants, when grown under abiotic stress conditions, having enhanced abiotic stress tolerance relative to control plants.

[0050] Therefore, the present invention provides a method for enhancing yield-related traits in plants grown under abiotic stress conditions, relative to control plants, comprising modulating expression in a plant of a nucleic acid encoding a SYR polypeptide.

### DEFINITIONS

### Polypeptide(s)/Protein(s)

[0051] The terms “polypeptide” and “protein” are used interchangeably herein and refer to amino acids in a polymeric form of any length, linked together by peptide bonds.

### Polynucleotide(s)/Nucleic Acid(s)/Nucleic Acid Sequence(s)/Nucleotide Sequence(s)

[0052] The terms “polynucleotide(s)”, “nucleic acid sequence(s)”, “nucleotide sequence(s)”, “nucleic acid(s)” “nucleic acid molecule” are used interchangeably herein and refer to nucleotides, either ribonucleotides or deoxyribonucleotides or a combination of both, in a polymeric unbranched form of any length.

### Control Plant(s)

[0053] The choice of suitable control plants is a routine part of an experimental setup and may include corresponding wild type plants or corresponding plants without the gene of interest. The control plant is typically of the same plant species or even of the same variety as the plant to be assessed. The control plant may also be a nullizygote of the plant to be assessed. Nullizygotes are individuals missing the transgene by segregation. A “control plant” as used herein refers not only to whole plants, but also to plant parts, including seeds and seed parts.

### Homoloque(s)

[0054] “Homologues” of a protein encompass peptides, oligopeptides, polypeptides, proteins and enzymes having amino acid substitutions, deletions and/or insertions relative to the unmodified protein in question and having similar biological and functional activity as the unmodified protein from which they are derived.

[0055] A deletion refers to removal of one or more amino acids from a protein.

[0056] An insertion refers to one or more amino acid residues being introduced into a predetermined site in a protein. Insertions may comprise N-terminal and/or C-terminal fusions as well as intra-sequence insertions of single or multiple amino acids. Generally, insertions within the amino acid sequence will be smaller than N- or C-terminal fusions, of the order of about 1 to 10 residues. Examples of N- or C-terminal fusion proteins or peptides include the binding domain or activation domain of a transcriptional activator as used in the yeast two-hybrid system, phage coat proteins, (histidine)-6-tag, glutathione S-transferase-tag, protein A, maltose-binding protein, dihydrofolate reductase, Tag-100 epitope, c-myc epitope, FLAG®-epitope, lacZ, CMP (calmodulin-binding peptide), HA epitope, protein C epitope and VSV epitope.

[0057] A substitution refers to replacement of amino acids of the protein with other amino acids having similar properties (such as similar hydrophobicity, hydrophilicity, antigenicity, propensity to form or break α-helical structures or β-sheet structures). Amino acid substitutions are typically of single residues, but may be clustered depending upon functional constraints placed upon the polypeptide; insertions will usually be of the order of about 1 to 10 amino acid residues. The amino acid substitutions are preferably conservative amino acid substitutions. Conservative substitution tables are well known in the art (see for example Creighton (1984) Proteins. W.H. Freeman and Company (Eds) and Table 1 below).

TABLE 1
Examples of conserved amino acid substitutions

| | Conservative |
|---|---|
| Residue | Substitutions |
| Ala | Ser |
| Arg | Lys |
| Asn | Gln; His |
| Asp | Glu |
| Gln | Asn |
| Cys | Ser |
| Glu | Asp |
| Gly | Pro |
| His | Asn; Gln |
| Ile | Leu, Val |
| Leu | Ile; Val |
| Lys | Arg; Gln |
| Met | Leu; Ile |
| Phe | Met; Leu; Tyr |
| Ser | Thr; Gly |
| Thr | Ser; Val |
| Trp | Tyr |
| Tyr | Trp; Phe |
| Val | Ile; Leu |

[0058] Amino acid substitutions, deletions and/or insertions may readily be made using peptide synthetic techniques well known in the art, such as solid phase peptide synthesis and the like, or by recombinant DNA manipulation. Methods for the manipulation of DNA sequences to produce substitution, insertion or deletion variants of a protein are well known in the art. For example, techniques for making substitution mutations at predetermined sites in DNA are well known to those skilled in the art and include M13 mutagenesis, T7-Gen in vitro mutagenesis (USB, Cleveland, Ohio), QuickChange Site Directed mutagenesis (Stratagene, San Diego, Calif.), PCR-mediated site-directed mutagenesis or other site-directed mutagenesis protocols.

### Derivatives

[0059] “Derivatives” include peptides, oligopeptides, polypeptides which may, compared to the amino acid sequence of the naturally-occurring form of the protein, such as the protein of interest, comprise substitutions of amino acids with non-naturally occurring amino acid residues, or additions of non-naturally occurring amino acid residues. “Derivatives” of a protein also encompass peptides, oligopeptides, polypeptides which comprise naturally occurring altered (glycosylated, acylated, prenylated, phosphorylated, myristoylated, sulphated etc.) or non-naturally altered amino acid residues compared to the amino acid sequence of a naturally-occurring form of the polypeptide. A derivative may also comprise one or more non-amino acid substituents or additions compared to the amino acid sequence from which it is derived, for example a reporter molecule or other ligand, covalently or non-covalently bound to the amino acid sequence, such as a reporter molecule which is bound to facilitate its detection, and non-naturally occurring amino acid residues relative to the amino acid sequence of a naturally-occurring protein. Furthermore, “derivatives” also include fusions of the naturally-occurring form of the protein with tagging peptides such as FLAG, HIS6 or thioredoxin (for a review of tagging peptides, see Terpe, Appl. Microbiol. Biotechnol. 60, 523-533, 2003).

### Ortholoque(s)/Paraloque(s)

[0060] Orthologues and paralogues encompass evolutionary concepts used to describe the ancestral relationships of genes. Paralogues are genes within the same species that have originated through duplication of an ancestral gene; orthologues are genes from different organisms that have originated through speciation, and are also derived from a common ancestral gene.

### Domain

[0061] The term “domain” refers to a set of amino acids conserved at specific positions along an alignment of sequences of evolutionarily related proteins. While amino acids at other positions can vary between homologues, amino acids that are highly conserved at specific positions indicate amino acids that are likely essential in the structure, stability or function of a protein. Identified by their high degree of conservation in aligned sequences of a family of protein homologues, they can be used as identifiers to determine if any polypeptide in question belongs to a previously identified polypeptide family.

### Motif/Consensus Sequence/Signature

[0062] The term “motif” or “consensus sequence” or “signature” refers to a short conserved region in the sequence of evolutionarily related proteins. Motifs are frequently highly conserved parts of domains, but may also include only part of the domain, or be located outside of conserved domain (if all of the amino acids of the motif fall outside of a defined domain).

### Hybridisation

[0063] The term “hybridisation” as defined herein is a process wherein substantially homologous complementary nucleotide sequences anneal to each other. The hybridisation process can occur entirely in solution, i.e. both complementary nucleic acids are in solution. The hybridisation process can also occur with one of the complementary nucleic acids immobilised to a matrix such as magnetic beads, Sepharose beads or any other resin. The hybridisation process can furthermore occur with one of the complementary nucleic acids immobilised to a solid support such as a nitro-cellulose or nylon membrane or immobilised by e.g. photolithography to, for example, a siliceous glass support (the latter known as nucleic acid arrays or microarrays or as nucleic acid chips). In order to allow hybridisation to occur, the nucleic acid molecules are generally thermally or chemically denatured to melt a double strand into two single strands and/or to remove hairpins or other secondary structures from single stranded nucleic acids.

[0064] The term “stringency” refers to the conditions under which a hybridisation takes place. The stringency of hybridisation is influenced by conditions such as temperature, salt concentration, ionic strength and hybridisation buffer composition. Generally, low stringency conditions are selected to be about 30° C. lower than the thermal melting point (Tₘ) for the specific sequence at a defined ionic strength and pH. Medium stringency conditions are when the temperature is 20° C. below Tₘ, and high stringency conditions are when the temperature is 10° C. below Tₘ. High stringency hybridisation conditions are typically used for isolating hybridising sequences that have high sequence similarity to the target nucleic acid sequence. However, nucleic acids may deviate in sequence and still encode a substantially identical polypeptide, due to the degeneracy of the genetic code. Therefore medium stringency hybridisation conditions may sometimes be needed to identify such nucleic acid molecules.

[0065] The Tm is the temperature under defined ionic strength and pH, at which 50% of the target sequence hybridises to a perfectly matched probe. The Tₘ is dependent upon the solution conditions and the base composition and length of the probe. For example, longer sequences hybridise specifically at higher temperatures. The maximum rate of hybridisation is obtained from about 16° C. up to 32° C. below Tₘ. The presence of monovalent cations in the hybridisation solution reduce the electrostatic repulsion between the two nucleic acid strands thereby promoting hybrid formation; this effect is visible for sodium concentrations of up to 0.4M (for higher concentrations, this effect may be ignored). Formamide reduces the melting temperature of DNA-DNA and DNA-RNA duplexes with 0.6 to 0.7° C. for each percent formamide, and addition of 50% formamide allows hybridisation to be performed at 30 to 45° C., though the rate of hybridisation will be lowered. Base pair mismatches reduce the hybridisation rate and the thermal stability of the duplexes. On average and for large probes, the Tm decreases about 1° C. per % base mismatch. The Tm may be calculated using the following equations, depending on the types of hybrids:

1) DNA-DNA hybrids (Meinkoth and Wahl, Anal. Biochem., 138: 267-284, 1984):

Tₘ=81.5° C.+16.6×log₁₀[Na⁺]^{a}+0.41×%[G/C^{b}]−500×[L^{c}]⁻¹−0.61×% formamide

2) DNA-RNA or RNA-RNA hybrids:

Tₘ=79.8+18.5 (log₁₀[Na⁺]^{a}+0.58 (% G/C^{b})+11.8 (% G/C^{b})²−820/L^{c}

3) oligo-DNA or oligo-RNA^{d} hybrids:
[0066] For <20 nucleotides: Tₘ=2 (lₙ)
[0067] For 20-35 nucleotides: Tₘ=22+1.46(lₙ)
[0068] ^{a} or for other monovalent cation, but only accurate in the 0.01-0.4 M range.
[0069] ^{b} only accurate for % GC in the 30% to 75% range.
[0070] ^{c}L=length of duplex in base pairs.
[0071] ^{d}oligo, oligonucleotide; lₙ, =effective length of primer=2×(no. of G/C)+(no. of A/T).

[0072] Non-specific binding may be controlled using any one of a number of known techniques such as, for example, blocking the membrane with protein containing solutions, additions of heterologous RNA, DNA, and SDS to the hybridisation buffer, and treatment with Rnase. For non-homologous probes, a series of hybridizations may be performed by varying one of (i) progressively lowering the annealing temperature (for example from 68° C. to 42° C.) or (ii) progressively lowering the formamide concentration (for example from 50% to 0%). The skilled artisan is aware of various parameters which may be altered during hybridisation and which will either maintain or change the stringency conditions.

[0073] Besides the hybridisation conditions, specificity of hybridisation typically also depends on the function of post-hybridisation washes. To remove background resulting from non-specific hybridisation, samples are washed with dilute salt solutions. Critical factors of such washes include the ionic strength and temperature of the final wash solution: the lower the salt concentration and the higher the wash temperature, the higher the stringency of the wash. Wash conditions are typically performed at or below hybridisation stringency. A positive hybridisation gives a signal that is at least twice of that of the background. Generally, suitable stringent conditions for nucleic acid hybridisation assays or gene amplification detection procedures are as set forth above. More or less stringent conditions may also be selected. The skilled artisan is aware of various parameters which may be altered during washing and which will either maintain or change the stringency conditions.

[0074] For example, typical high stringency hybridisation conditions for DNA hybrids longer than 50 nucleotides encompass hybridisation at 65° C. in 1×SSC or at 42° C. in 1×SSC and 50% formamide, followed by washing at 65° C. in 0.3×SSC. Examples of medium stringency hybridisation conditions for DNA hybrids longer than 50 nucleotides encompass hybridisation at 50° C. in 4×SSC or at 40° C. in 6×SSC and 50% formamide, followed by washing at 50° C. in 2×SSC. The length of the hybrid is the anticipated length for the hybridising nucleic acid. When nucleic acids of known sequence are hybridised, the hybrid length may be determined by aligning the sequences and identifying the conserved regions described herein. 1×SSC is 0.15M NaCl and 15 mM sodium citrate; the hybridisation solution and wash solutions may additionally include 5×Denhardt's reagent, 0.5-1.0% SDS, 100 μg/ml denatured, fragmented salmon sperm DNA, 0.5% sodium pyrophosphate.

[0075] For the purposes of defining the level of stringency, reference can be made to Sambrook et al. (2001) Molecular Cloning: a laboratory manual, 3^{rd} Edition, Cold Spring Harbor Laboratory Press, CSH, New York or to Current Protocols in Molecular Biology, John Wiley & Sons, N.Y. (1989 and yearly updates).

### Splice Variant

[0076] The term “splice variant” as used herein encompasses variants of a nucleic acid sequence in which selected introns and/or exons have been excised, replaced, displaced or added, or in which introns have been shortened or lengthened. Such variants will be ones in which the biological activity of the protein is substantially retained; this may be achieved by selectively retaining functional segments of the protein. Such splice variants may be found in nature or may be manmade. Methods for predicting and isolating such splice variants are well known in the art (see for example Foissac and Schiex (2005) BMC Bioinformatics 6: 25).

### Allelic Variant

[0077] Alleles or allelic variants are alternative forms of a given gene, located at the same chromosomal position. Allelic variants encompass Single Nucleotide Polymorphisms (SNPs), as well as Small Insertion/Deletion Polymorphisms (INDELs). The size of INDELs is usually less than 100 bp. SNPs and INDELs form the largest set of sequence variants in naturally occurring polymorphic strains of most organisms.

### Gene Shuffling/Directed Evolution

[0078] Gene shuffling or directed evolution consists of iterations of DNA shuffling followed by appropriate screening and/or selection to generate variants of nucleic acids or portions thereof encoding proteins having a modified biological activity (Castle et al., (2004) Science 304(5674): 1151-4; U.S. Pat. Nos. 5,811,238 and 6,395,547).

### Regulatory Element/Control Sequence/Promoter

[0079] The terms “regulatory element”, “control sequence” and “promoter” are all used interchangeably herein and are to be taken in a broad context to refer to regulatory nucleic acid sequences capable of effecting expression of the sequences to which they are ligated. The term “promoter” typically refers to a nucleic acid control sequence located upstream from the transcriptional start of a gene and which is involved in recognising and binding of RNA polymerase and other proteins, thereby directing transcription of an operably linked nucleic acid. Encompassed by the aforementioned terms are transcriptional regulatory sequences derived from a classical eukaryotic genomic gene (including the TATA box which is required for accurate transcription initiation, with or without a CCAAT box sequence) and additional regulatory elements (i.e. upstream activating sequences, enhancers and silencers) which alter gene expression in response to developmental and/or external stimuli, or in a tissue-specific manner. Also included within the term is a transcriptional regulatory sequence of a classical prokaryotic gene, in which case it may include a −35 box sequence and/or −10 box transcriptional regulatory sequences. The term “regulatory element” also encompasses a synthetic fusion molecule or derivative that confers, activates or enhances expression of a nucleic acid molecule in a cell, tissue or organ.

[0080] A “plant promoter” comprises regulatory elements, which mediate the expression of a coding sequence segment in plant cells. Accordingly, a plant promoter need not be of plant origin, but may originate from viruses or micro-organisms, for example from viruses which attack plant cells. The “plant promoter” can also originate from a plant cell, e.g. from the plant which is transformed with the nucleic acid sequence to be expressed in the inventive process and described herein. This also applies to other “plant” regulatory signals, such as “plant” terminators. The promoters upstream of the nucleotide sequences useful in the methods of the present invention can be modified by one or more nucleotide substitution(s), insertion(s) and/or deletion(s) without interfering with the functionality or activity of either the promoters, the open reading frame (ORF) or the 3′-regulatory region such as terminators or other 3′ regulatory regions which are located away from the ORF. It is furthermore possible that the activity of the promoters is increased by modification of their sequence, or that they are replaced completely by more active promoters, even promoters from heterologous organisms. For expression in plants, the nucleic acid molecule must, as described above, be linked operably to or comprise a suitable promoter which expresses the gene at the right point in time and with the required spatial expression pattern.

[0081] For the identification of functionally equivalent promoters, the promoter strength and/or expression pattern of a candidate promoter may be analysed for example by operably linking the promoter to a reporter gene and assaying the expression level and pattern of the reporter gene in various tissues of the plant. Suitable well-known reporter genes include for example beta-glucuronidase or beta-galactosidase. The promoter activity is assayed by measuring the enzymatic activity of the beta-glucuronidase or beta-galactosidase. The promoter strength and/or expression pattern may then be compared to that of a reference promoter (such as the one used in the methods of the present invention). Alternatively, promoter strength may be assayed by quantifying mRNA levels or by comparing mRNA levels of the nucleic acid used in the methods of the present invention, with mRNA levels of housekeeping genes such as 18S rRNA, using methods known in the art, such as Northern blotting with densitometric analysis of autoradiograms, quantitative real-time PCR or RT-PCR (Heid et al., 1996 Genome Methods 6: 986-994). Generally by “weak promoter” is intended a promoter that drives expression of a coding sequence at a low level. By “low level” is intended at levels of about 1/10,000 transcripts to about 1/100,000 transcripts, to about 1/500,0000 transcripts per cell. Conversely, a “strong promoter” drives expression of a coding sequence at high level, or at about 1/10 transcripts to about 1/100 transcripts to about 1/1000 transcripts per cell.

### Operably Linked

[0082] The term “operably linked” as used herein refers to a functional linkage between the promoter sequence and the gene of interest, such that the promoter sequence is able to initiate transcription of the gene of interest.

### Constitutive Promoter

[0083] A “constitutive promoter” refers to a promoter that is transcriptionally active during most, but not necessarily all, phases of growth and development and under most environmental conditions, in at least one cell, tissue or organ. Table 2a below gives examples of constitutive promoters.

TABLE 2a
Examples of constitutive promoters

| Gene Source | Reference |
|---|---|
| Actin | McElroy et al, Plant Cell, 2: 163-171, 1990 |
| HMGB | WO 2004/070039 |
| CAMV 35S | Odell et al, Nature, 313: 810-812, 1985 |
| CaMV 19S | Nilsson et al., Physiol. Plant. 100: 456-462, 1997 |
| GOS2 | de Pater et al, Plant J Nov; 2(6): 837-44, 1992, |
| | WO 2004/065596 |
| Ubiquitin | Christensen et al, Plant Mol. Biol. 18: 675-689, |
| | 1992 |
| Rice cyclophilin | Buchholz et al, Plant Mol Biol. 25(5): 837-43, 1994 |
| Maize H3 histone | Lepetit et al, Mol. Gen. Genet. 231: 276-285, 1992 |
| Alfalfa H3 histone | Wu et al. Plant Mol. Biol. 11: 641-649, 1988 |
| Actin 2 | An et al, Plant J. 10(1); 107-121, 1996 |
| 34S FMV | Sanger et al., Plant. Mol. Biol., 14, 1990: 433-443 |
| Rubisco small | U.S. Pat. No. 4,962,028 |
| subunit | |
| OCS | Leisner (1988) Proc Natl Acad Sci USA 85(5): 2553 |
| SAD1 | Jain et al., Crop Science, 39 (6), 1999: 1696 |
| SAD2 | Jain et al., Crop Science, 39 (6), 1999: 1696 |
| nos | Shaw et al. (1984) Nucleic Acids Res. |
| | 12(20): 7831-7846 |
| V-ATPase | WO 01/14572 |
| Super promoter | WO 95/14098 |
| G-box proteins | WO 94/12015 |

### Ubiquitous Promoter

[0084] A ubiquitous promoter is active in substantially all tissues or cells of an organism.

### Developmentally-Regulated Promoter

[0085] A developmentally-regulated promoter is active during certain developmental stages or in parts of the plant that undergo developmental changes.

### Inducible Promoter

[0086] An inducible promoter has induced or increased transcription initiation in response to a chemical (for a review see Gatz 1997, Annu. Rev. Plant Physiol. Plant Mol. Biol., 48:89-108), environmental or physical stimulus, or may be “stress-inducible”, i.e. activated when a plant is exposed to various stress conditions, or a “pathogen-inducible” i.e. activated when a plant is exposed to exposure to various pathogens.

### Organ-Specific/Tissue-Specific Promoter

[0087] An organ-specific or tissue-specific promoter is one that is capable of preferentially initiating transcription in certain organs or tissues, such as the leaves, roots, seed tissue etc. For example, a “root-specific promoter” is a promoter that is transcriptionally active predominantly in plant roots, substantially to the exclusion of any other parts of a plant, whilst still allowing for any leaky expression in these other plant parts. Promoters able to initiate transcription in certain cells only are referred to herein as “cell-specific”.

[0088] A seed-specific promoter is transcriptionally active predominantly in seed tissue, but not necessarily exclusively in seed tissue (in cases of leaky expression). The seed-specific promoter may be active during seed development and/or during germination. Some seed specific promoters may be specific for the endosperm, aleurone and/or embryo. Examples of seed-specific promoters are shown in Table 2b below and of endosperm-specific promoters in Table 2c. Further examples of seed-specific promoters are given in Qing Qu and Takaiwa (Plant Biotechnol. J. 2, 113-125, 2004), which disclosure is incorporated by reference herein as if fully set forth.

TABLE 2b
Examples of seed-specific promoters

| Gene source | Reference |
|---|---|
| seed-specific genes | Simon et al., Plant Mol. Biol. 5: 191, 1985; |
| | Scofield et al., J. Biol. Chem. 262: 12202, 1987.; |
| | Baszczynski et al., Plant Mol. Biol. 14: 633, 1990. |
| Brazil Nut albumin | Pearson et al., Plant Mol. Biol. 18: 235-245, 1992. |
| legumin | Ellis et al., Plant Mol. Biol. 10: 203-214, 1988. |
| glutelin (rice) | Takaiwa et al., Mol. Gen. Genet. 208: 15-22, 1986; |
| | Takaiwa et al., FEBS Letts. 221: 43-47, 1987. |
| zein | Matzke et al Plant Mol Biol, 14(3): 323-32 1990 |
| napA | Stalberg et al, Planta 199: 515-519, 1996. |
| wheat LMW and HMW glutenin-1 | Mol Gen Genet 216: 81-90, 1989; NAR 17: 461-2, 1989 |
| wheat SPA | Albani et al, Plant Cell, 9: 171-184, 1997 |
| wheat α, β, γ-gliadins | EMBO J. 3: 1409-15, 1984 |
| barley Itr1 promoter | Diaz et al. (1995) Mol Gen Genet 248(5): 592-8 |
| barley B1, C, D, hordein | Theor Appl Gen 98: 1253-62, 1999; Plant J 4: 343-55, 1993; |
| | Mol Gen Genet 250: 750-60, 1996 |
| barley DOF | Mena et al, The Plant Journal, 116(1): 53-62, 1998 |
| blz2 | EP99106056.7 |
| synthetic promoter | Vicente-Carbajosa et al., Plant J. 13: 629-640, 1998. |
| rice prolamin NRP33 | Wu et al, Plant Cell Physiology 39(8) 885-889, 1998 |
| rice α-globulin Glb-1 | Wu et al, Plant Cell Physiology 39(8) 885-889, 1998 |
| rice OSH1 | Sato et al, Proc. Natl. Acad. Sci. USA, 93: 8117-8122, 1996 |
| rice α-globulin REB/OHP-1 | Nakase et al. Plant Mol. Biol. 33: 513-522, 1997 |
| rice ADP-glucose pyrophosphorylase | Trans Res 6: 157-68, 1997 |
| maize ESR gene family | Plant J 12: 235-46, 1997 |
| sorghum α-kafirin | DeRose et al., Plant Mol. Biol 32: 1029-35, 1996 |
| KNOX | Postma-Haarsma et al, Plant Mol. Biol. 39: 257-71, 1999 |
| rice oleosin | Wu et al, J. Biochem. 123: 386, 1998 |
| sunflower oleosin | Cummins et al., Plant Mol. Biol. 19: 873-876, 1992 |
| PRO0117, putative rice 40S | WO 2004/070039 |
| ribosomal protein | |
| PRO0136, rice alanine | unpublished |
| aminotransferase | |
| PRO0147, trypsin inhibitor ITR1 | unpublished |
| (barley) | |
| PRO0151, rice WSI18 | WO 2004/070039 |
| PRO0175, rice RAB21 | WO 2004/070039 |
| PRO005 | WO 2004/070039 |
| PRO0095 | WO 2004/070039 |
| α-amylase (Amy32b) | Lanahan et al, Plant Cell 4: 203-211, 1992; Skriver et al, |
| | Proc Natl Acad Sci USA 88: 7266-7270, 1991 |
| cathepsin β-like gene | Cejudo et al, Plant Mol Biol 20: 849-856, 1992 |
| Barley Ltp2 | Kalla et al., Plant J. 6: 849-60, 1994 |
| Chi26 | Leah et al., Plant J. 4: 579-89, 1994 |
| Maize B-Peru | Selinger et al., Genetics 149; 1125-38, 1998 |

TABLE 2c
Examples of endosperm-specific promoters

| Gene source | Reference |
|---|---|
| glutelin (rice) | Takaiwa et al. (1986) Mol Gen Genet 208: 15-22; Takaiwa et al. |
| | (1987) FEBS Letts. 221: 43-47 |
| zein | Matzke et al., (1990) Plant Mol Biol 14(3): 323-32 |
| wheat LMW and HMW | Colot et al. (1989) Mol Gen Genet 216: 81-90, Anderson et al. |
| glutenin-1 | (1989) NAR 17: 461-2 |
| wheat SPA | Albani et al. (1997) Plant Cell 9: 171-184 |
| wheat gliadins | Rafalski et al. (1984) EMBO 3: 1409-15 |
| barley Itr1 promoter | Diaz et al. (1995) Mol Gen Genet 248(5): 592-8 |
| barley B1, C, D, hordein | Cho et al. (1999) Theor Appl Genet 98: 1253-62; Muller et al. |
| | (1993) Plant J 4: 343-55; Sorenson et al. (1996) Mol Gen Genet |
| | 250: 750-60 |
| barley DOF | Mena et al, (1998) Plant J 116(1): 53-62 |
| blz2 | Onate et al. (1999) J Biol Chem 274(14): 9175-82 |
| synthetic promoter | Vicente-Carbajosa et al. (1998) Plant J 13: 629-640 |
| rice prolamin NRP33 | Wu et al, (1998) Plant Cell Physiol 39(8) 885-889 |
| rice globulin Glb-1 | Wu et al. (1998) Plant Cell Physiol 39(8) 885-889 |
| rice globulin REB/OHP-1 | Nakase et al. (1997) Plant Molec Biol 33: 513-522 |
| rice ADP-glucose | Russell et al. (1997) Trans Res 6: 157-68 |
| pyrophosphorylase | |
| maize ESR gene family | Opsahl-Ferstad et al. (1997) Plant J 12: 235-46 |
| sorghum kafirin | DeRose et al. (1996) Plant Mol Biol 32: 1029-35 |

[0089] A green tissue-specific promoter as defined herein is a promoter that is transcriptionally active predominantly in green tissue, substantially to the exclusion of any other parts of a plant, whilst still allowing for any leaky expression in these other plant parts.

[0090] Another example of a tissue-specific promoter is a meristem-specific promoter, which is transcriptionally active predominantly in meristematic tissue, substantially to the exclusion of any other parts of a plant, whilst still allowing for any leaky expression in these other plant parts.

### Terminator

[0091] The term “terminator” encompasses a control sequence which is a DNA sequence at the end of a transcriptional unit which signals 3′ processing and polyadenylation of a primary transcript and termination of transcription. The terminator can be derived from the natural gene, from a variety of other plant genes, or from T-DNA. The terminator to be added may be derived from, for example, the nopaline synthase or octopine synthase genes, or alternatively from another plant gene, or less preferably from any other eukaryotic gene.

### Modulation

[0092] The term “modulation” means in relation to expression or gene expression, a process in which the expression level is changed by said gene expression in comparison to the control plant, preferably the expression level is increased. The original, unmodulated expression may be of any kind of expression of a structural RNA (rRNA, tRNA) or mRNA with subsequent translation. The term “modulating the activity” shall mean any change of the expression of the inventive nucleic acid sequences or encoded proteins, which leads to increased yield and/or increased growth of the plants.

### Expression

[0093] The term “expression” or “gene expression” means the transcription of a specific gene or specific genes or specific genetic construct. The term “expression” or “gene expression” in particular means the transcription of a gene or genes or genetic construct into structural RNA (rRNA, tRNA) or mRNA with or without subsequent translation of the latter into a protein. The process includes transcription of DNA and processing of the resulting mRNA product.

### Increased Expression/Overexpression

[0094] The term “increased expression” or “overexpression” as used herein means any form of expression that is additional to the original wild-type expression level.

[0095] Methods for increasing expression of genes or gene products are well documented in the art and include, for example, overexpression driven by appropriate promoters, the use of transcription enhancers or translation enhancers. Isolated nucleic acids which serve as promoter or enhancer elements may be introduced in an appropriate position (typically upstream) of a non-heterologous form of a polynucleotide so as to upregulate expression of a nucleic acid encoding the polypeptide of interest. For example, endogenous promoters may be altered in vivo by mutation, deletion, and/or substitution (see, Kmiec, U.S. Pat. No. 5,565,350; Zarling et al., WO9322443), or isolated promoters may be introduced into a plant cell in the proper orientation and distance from a gene of the present invention so as to control the expression of the gene.

[0096] If polypeptide expression is desired, it is generally desirable to include a polyadenylation region at the 3′-end of a polynucleotide coding region. The polyadenylation region can be derived from the natural gene, from a variety of other plant genes, or from T-DNA. The 3′ end sequence to be added may be derived from, for example, the nopaline synthase or octopine synthase genes, or alternatively from another plant gene, or less preferably from any other eukaryotic gene.

[0097] An intron sequence may also be added to the 5′ untranslated region (UTR) or the coding sequence of the partial coding sequence to increase the amount of the mature message that accumulates in the cytosol. Inclusion of a spliceable intron in the transcription unit in both plant and animal expression constructs has been shown to increase gene expression at both the mRNA and protein levels up to 1000-fold (Buchman and Berg (1988) Mol. Cell biol. 8: 4395-4405; Callis et al. (1987) Genes Dev 1:1183-1200). Such intron enhancement of gene expression is typically greatest when placed near the 5′ end of the transcription unit. Use of the maize introns Adhl-S intron 1, 2, and 6, the Bronze-1 intron are known in the art. For general information see: The Maize Handbook, Chapter 116, Freeling and Walbot, Eds., Springer, N.Y. (1994).

### Endogenous Gene

[0098] Reference herein to an “endogenous” gene not only refers to the gene in question as found in a plant in its natural form (i.e., without there being any human intervention), but also refers to that same gene (or a substantially homologous nucleic acid/gene) in an isolated form subsequently (re)introduced into a plant (a transgene). For example, a transgenic plant containing such a transgene may encounter a substantial reduction of the transgene expression and/or substantial reduction of expression of the endogenous gene.

### Isolated Gene

[0099] The isolated gene may be isolated from an organism or may be manmade, for example by chemical synthesis.

### Decreased Expression

[0100] Reference herein to “decreased epression” or “reduction or substantial elimination” of expression is taken to mean a decrease in endogenous gene expression and/or polypeptide levels and/or polypeptide activity relative to control plants. The reduction or substantial elimination is in increasing order of preference at least 10%, 20%, 30%, 40% or 50%, 60%, 70%, 80%, 85%, 90%, or 95%, 96%, 97%, 98%, 99% or more reduced compared to that of control plants.

[0101] For the reduction or substantial elimination of expression an endogenous gene in a plant, a sufficient length of substantially contiguous nucleotides of a nucleic acid sequence is required. In order to perform gene silencing, this may be as little as 20, 19, 18, 17, 16, 15, 14, 13, 12, 11, 10 or fewer nucleotides, alternatively this may be as much as the entire gene (including the 5′ and/or 3′ UTR, either in part or in whole). The stretch of substantially contiguous nucleotides may be derived from the nucleic acid encoding the protein of interest (target gene), or from any nucleic acid capable of encoding an orthologue, paralogue or homologue of the protein of interest. Preferably, the stretch of substantially contiguous nucleotides is capable of forming hydrogen bonds with the target gene (either sense or antisense strand), more preferably, the stretch of substantially contiguous nucleotides has, in increasing order of preference, 50%, 60%, 70%, 80%, 85%, 90%, 95%, 96%, 97%, 98%, 99%, 100% sequence identity to the target gene (either sense or antisense strand). A nucleic acid sequence encoding a (functional) polypeptide is not a requirement for the various methods discussed herein for the reduction or substantial elimination of expression of an endogenous gene.

[0102] This reduction or substantial elimination of expression may be achieved using routine tools and techniques. A preferred method for the reduction or substantial elimination of endogenous gene expression is by introducing and expressing in a plant a genetic construct into which the nucleic acid (in this case a stretch of substantially contiguous nucleotides derived from the gene of interest, or from any nucleic acid capable of encoding an orthologue, paralogue or homologue of any one of the protein of interest) is cloned as an inverted repeat (in part or completely), separated by a spacer (non-coding DNA).

[0103] In such a preferred method, expression of the endogenous gene is reduced or substantially eliminated through RNA-mediated silencing using an inverted repeat of a nucleic acid or a part thereof (in this case a stretch of substantially contiguous nucleotides derived from the gene of interest, or from any nucleic acid capable of encoding an orthologue, paralogue or homologue of the protein of interest), preferably capable of forming a hairpin structure. The inverted repeat is cloned in an expression vector comprising control sequences. A non-coding DNA nucleic acid sequence (a spacer, for example a matrix attachment region fragment (MAR), an intron, a polylinker, etc.) is located between the two inverted nucleic acids forming the inverted repeat. After transcription of the inverted repeat, a chimeric RNA with a self-complementary structure is formed (partial or complete). This double-stranded RNA structure is referred to as the hairpin RNA (hpRNA). The hpRNA is processed by the plant into siRNAs that are incorporated into an RNA-induced silencing complex (RISC). The RISC further cleaves the mRNA transcripts, thereby substantially reducing the number of mRNA transcripts to be translated into polypeptides. For further general details see for example, Grierson et al. (1998) WO 98/53083; Waterhouse et al. (1999) WO 99/53050).

[0104] Performance of the methods of the invention does not rely on introducing and expressing in a plant a genetic construct into which the nucleic acid is cloned as an inverted repeat, but any one or more of several well-known “gene silencing” methods may be used to achieve the same effects.

[0105] One such method for the reduction of endogenous gene expression is RNA-mediated silencing of gene expression (downregulation). Silencing in this case is triggered in a plant by a double stranded RNA sequence (dsRNA) that is substantially similar to the target endogenous gene. This dsRNA is further processed by the plant into about 20 to about 26 nucleotides called short interfering RNAs (siRNAs). The siRNAs are incorporated into an RNA-induced silencing complex (RISC) that cleaves the mRNA transcript of the endogenous target gene, thereby substantially reducing the number of mRNA transcripts to be translated into a polypeptide. Preferably, the double stranded RNA sequence corresponds to a target gene.

[0106] Another example of an RNA silencing method involves the introduction of nucleic acid sequences or parts thereof (in this case a stretch of substantially contiguous nucleotides derived from the gene of interest, or from any nucleic acid capable of encoding an orthologue, paralogue or homologue of the protein of interest) in a sense orientation into a plant. “Sense orientation” refers to a DNA sequence that is homologous to an mRNA transcript thereof. Introduced into a plant would therefore be at least one copy of the nucleic acid sequence. The additional nucleic acid sequence will reduce expression of the endogenous gene, giving rise to a phenomenon known as co-suppression. The reduction of gene expression will be more pronounced if several additional copies of a nucleic acid sequence are introduced into the plant, as there is a positive correlation between high transcript levels and the triggering of co-suppression.

[0107] Another example of an RNA silencing method involves the use of antisense nucleic acid sequences. An “antisense” nucleic acid sequence comprises a nucleotide sequence that is complementary to a “sense” nucleic acid sequence encoding a protein, i.e. complementary to the coding strand of a double-stranded cDNA molecule or complementary to an mRNA transcript sequence. The antisense nucleic acid sequence is preferably complementary to the endogenous gene to be silenced. The complementarity may be located in the “coding region” and/or in the “non-coding region” of a gene. The term “coding region” refers to a region of the nucleotide sequence comprising codons that are translated into amino acid residues. The term “non-coding region” refers to 5′ and 3′ sequences that flank the coding region that are transcribed but not translated into amino acids (also referred to as 5′ and 3′ untranslated regions).

[0108] Antisense nucleic acid sequences can be designed according to the rules of Watson and Crick base pairing. The antisense nucleic acid sequence may be complementary to the entire nucleic acid sequence (in this case a stretch of substantially contiguous nucleotides derived from the gene of interest, or from any nucleic acid capable of encoding an orthologue, paralogue or homologue of the protein of interest), but may also be an oligonucleotide that is antisense to only a part of the nucleic acid sequence (including the mRNA 5′ and 3′ UTR). For example, the antisense oligonucleotide sequence may be complementary to the region surrounding the translation start site of an mRNA transcript encoding a polypeptide. The length of a suitable antisense oligonucleotide sequence is known in the art and may start from about 50, 45, 40, 35, 30, 25, 20, 15 or 10 nucleotides in length or less. An antisense nucleic acid sequence according to the invention may be constructed using chemical synthesis and enzymatic ligation reactions using methods known in the art. For example, an antisense nucleic acid sequence (e.g., an antisense oligonucleotide sequence) may be chemically synthesized using naturally occurring nucleotides or variously modified nucleotides designed to increase the biological stability of the molecules or to increase the physical stability of the duplex formed between the antisense and sense nucleic acid sequences, e.g., phosphorothioate derivatives and acridine substituted nucleotides may be used. Examples of modified nucleotides that may be used to generate the antisense nucleic acid sequences are well known in the art. Known nucleotide modifications include methylation, cyclization and ‘caps’ and substitution of one or more of the naturally occurring nucleotides with an analogue such as inosine. Other modifications of nucleotides are well known in the art.

[0109] The antisense nucleic acid sequence can be produced biologically using an expression vector into which a nucleic acid sequence has been subcloned in an antisense orientation (i.e., RNA transcribed from the inserted nucleic acid will be of an antisense orientation to a target nucleic acid of interest). Preferably, production of antisense nucleic acid sequences in plants occurs by means of a stably integrated nucleic acid construct comprising a promoter, an operably linked antisense oligonucleotide, and a terminator.

[0110] The nucleic acid molecules used for silencing in the methods of the invention (whether introduced into a plant or generated in situ) hybridize with or bind to mRNA transcripts and/or genomic DNA encoding a polypeptide to thereby inhibit expression of the protein, e.g., by inhibiting transcription and/or translation. The hybridization can be by conventional nucleotide complementarity to form a stable duplex, or, for example, in the case of an antisense nucleic acid sequence which binds to DNA duplexes, through specific interactions in the major groove of the double helix. Antisense nucleic acid sequences may be introduced into a plant by transformation or direct injection at a specific tissue site. Alternatively, antisense nucleic acid sequences can be modified to target selected cells and then administered systemically. For example, for systemic administration, antisense nucleic acid sequences can be modified such that they specifically bind to receptors or antigens expressed on a selected cell surface, e.g., by linking the antisense nucleic acid sequence to peptides or antibodies which bind to cell surface receptors or antigens. The antisense nucleic acid sequences can also be delivered to cells using the vectors described herein.

[0111] According to a further aspect, the antisense nucleic acid sequence is an a-anomeric nucleic acid sequence. An a-anomeric nucleic acid sequence forms specific double-stranded hybrids with complementary RNA in which, contrary to the usual b-units, the strands run parallel to each other (Gaultier et al. (1987) Nucl Ac Res 15: 6625-6641). The antisense nucleic acid sequence may also comprise a 2′-o-methylribonucleotide (Inoue et al. (1987) Nucl Ac Res 15, 6131-6148) or a chimeric RNA-DNA analogue (Inoue et al. (1987) FEBS Lett. 215, 327-330).

[0112] The reduction or substantial elimination of endogenous gene expression may also be performed using ribozymes. Ribozymes are catalytic RNA molecules with ribonuclease activity that are capable of cleaving a single-stranded nucleic acid sequence, such as an mRNA, to which they have a complementary region. Thus, ribozymes (e.g., hammerhead ribozymes (described in Haselhoff and Gerlach (1988) Nature 334, 585-591) can be used to catalytically cleave mRNA transcripts encoding a polypeptide, thereby substantially reducing the number of mRNA transcripts to be translated into a polypeptide. A ribozyme having specificity for a nucleic acid sequence can be designed (see for example: Cech et al. U.S. Pat. No. 4,987,071; and Cech et al. U.S. Pat. No. 5,116,742). Alternatively, mRNA transcripts corresponding to a nucleic acid sequence can be used to select a catalytic RNA having a specific ribonuclease activity from a pool of RNA molecules (Bartel and Szostak (1993) Science 261, 1411-1418). The use of ribozymes for gene silencing in plants is known in the art (e.g., Atkins et al. (1994) WO 94/00012; Lenne et al. (1995) WO 95/03404; Lutziger et al. (2000) WO 00/00619; Prinsen et al. (1997) WO 97/13865 and Scott et al. (1997) WO 97/38116).

[0113] Gene silencing may also be achieved by insertion mutagenesis (for example, T-DNA insertion or transposon insertion) or by strategies as described by, among others, Angell and Baulcombe ((1999) Plant J 20(3): 357-62), (Amplicon VIGS WO 98/36083), or Baulcombe (WO 99/15682).

[0114] Gene silencing may also occur if there is a mutation on an endogenous gene and/or a mutation on an isolated gene/nucleic acid subsequently introduced into a plant. The reduction or substantial elimination may be caused by a non-functional polypeptide. For example, a polypeptide may bind to various interacting proteins; one or more mutation(s) and/or truncation(s) may therefore provide for a polypeptide that is still able to bind interacting proteins (such as receptor proteins) but that cannot exhibit its normal function (such as signalling ligand).

[0115] A further approach to gene silencing is by targeting nucleic acid sequences complementary to the regulatory region of the gene (e.g., the promoter and/or enhancers) to form triple helical structures that prevent transcription of the gene in target cells. See Helene, C., Anticancer Drug Res. 6, 569-84, 1991; Helene et al., Ann. N.Y. Acad. Sci. 660, 27-36 1992; and Maher, L. J. Bioassays 14, 807-15,1992.

[0116] Other methods, such as the use of antibodies directed to an endogenous polypeptide for inhibiting its function in planta, or interference in the signalling pathway in which a polypeptide is involved, will be well known to the skilled man. In particular, it can be envisaged that manmade molecules may be useful for inhibiting the biological function of a target polypeptide, or for interfering with the signalling pathway in which the target polypeptide is involved.

[0117] Alternatively, a screening program may be set up to identify in a plant population natural variants of a gene, which variants encode polypeptides with reduced activity. Such natural variants may also be used for example, to perform homologous recombination.

[0118] Artificial and/or natural microRNAs (miRNAs) may be used to knock out gene expression and/or mRNA translation. Endogenous miRNAs are single stranded small RNAs of typically 19-24 nucleotides long. They function primarily to regulate gene expression and/or mRNA translation. Most plant microRNAs (miRNAs) have perfect or near-perfect complementarity with their target sequences. However, there are natural targets with up to five mismatches. They are processed from longer non-coding RNAs with characteristic fold-back structures by double-strand specific RNases of the Dicer family. Upon processing, they are incorporated in the RNA-induced silencing complex (RISC) by binding to its main component, an Argonaute protein. mRNAs serve as the specificity components of RISC, since they base-pair to target nucleic acids, mostly mRNAs, in the cytoplasm. Subsequent regulatory events include target mRNA cleavage and destruction and/or translational inhibition. Effects of miRNA overexpression are thus often reflected in decreased mRNA levels of target genes.

[0119] Artificial microRNAs (amiRNAs), which are typically 21 nucleotides in length, can be genetically engineered specifically to negatively regulate gene expression of single or multiple genes of interest. Determinants of plant microRNA target selection are well known in the art. Empirical parameters for target recognition have been defined and can be used to aid in the design of specific amiRNAs, (Schwab et al., Dev. Cell 8, 517-527, 2005). Convenient tools for design and generation of amiRNAs and their precursors are also available to the public (Schwab et al., Plant Cell 18, 1121-1133, 2006).

[0120] For optimal performance, the gene silencing techniques used for reducing expression in a plant of an endogenous gene requires the use of nucleic acid sequences from monocotyledonous plants for transformation of monocotyledonous plants, and from dicotyledonous plants for transformation of dicotyledonous plants. Preferably, a nucleic acid sequence from any given plant species is introduced into that same species. For example, a nucleic acid sequence from rice is transformed into a rice plant. However, it is not an absolute requirement that the nucleic acid sequence to be introduced originates from the same plant species as the plant in which it will be introduced. It is sufficient that there is substantial homology between the endogenous target gene and the nucleic acid to be introduced.

[0121] Described above are examples of various methods for the reduction or substantial elimination of expression in a plant of an endogenous gene. A person skilled in the art would readily be able to adapt the aforementioned methods for silencing so as to achieve reduction of expression of an endogenous gene in a whole plant or in parts thereof through the use of an appropriate promoter, for example.

### Selectable Marker (Gene)/Reporter Gene

[0122] “Selectable marker”, “selectable marker gene” or “reporter gene” includes any gene that confers a phenotype on a cell in which it is expressed to facilitate the identification and/or selection of cells that are transfected or transformed with a nucleic acid construct of the invention. These marker genes enable the identification of a successful transfer of the nucleic acid molecules via a series of different principles. Suitable markers may be selected from markers that confer antibiotic or herbicide resistance, that introduce a new metabolic trait or that allow visual selection. Examples of selectable marker genes include genes conferring resistance to antibiotics (such as nptII that phosphorylates neomycin and kanamycin, or hpt, phosphorylating hygromycin, or genes conferring resistance to, for example, bleomycin, streptomycin, tetracyclin, chloramphenicol, ampicillin, gentamycin, geneticin (G418), spectinomycin or blasticidin), to herbicides (for example bar which provides resistance to Basta®; aroA or gox providing resistance against glyphosate, or the genes conferring resistance to, for example, imidazolinone, phosphinothricin or sulfonylurea), or genes that provide a metabolic trait (such as manA that allows plants to use mannose as sole carbon source or xylose isomerase for the utilisation of xylose, or antinutritive markers such as the resistance to 2-deoxyglucose). Expression of visual marker genes results in the formation of colour (for example β-glucuronidase, GUS or β-galactosidase with its coloured substrates, for example X-Gal), luminescence (such as the luciferin/luceferase system) or fluorescence (Green Fluorescent Protein, GFP, and derivatives thereof). This list represents only a small number of possible markers. The skilled worker is familiar with such markers. Different markers are preferred, depending on the organism and the selection method.

[0123] It is known that upon stable or transient integration of nucleic acids into plant cells, only a minority of the cells takes up the foreign DNA and, if desired, integrates it into its genome, depending on the expression vector used and the transfection technique used. To identify and select these integrants, a gene coding for a selectable marker (such as the ones described above) is usually introduced into the host cells together with the gene of interest. These markers can for example be used in mutants in which these genes are not functional by, for example, deletion by conventional methods. Furthermore, nucleic acid molecules encoding a selectable marker can be introduced into a host cell on the same vector that comprises the sequence encoding the polypeptides of the invention or used in the methods of the invention, or else in a separate vector. Cells which have been stably transfected with the introduced nucleic acid can be identified for example by selection (for example, cells which have integrated the selectable marker survive whereas the other cells die).

[0124] Since the marker genes, particularly genes for resistance to antibiotics and herbicides, are no longer required or are undesired in the transgenic host cell once the nucleic acids have been introduced successfully, the process according to the invention for introducing the nucleic acids advantageously employs techniques which enable the removal or excision of these marker genes. One such a method is what is known as co-transformation. The co-transformation method employs two vectors simultaneously for the transformation, one vector bearing the nucleic acid according to the invention and a second bearing the marker gene(s). A large proportion of transformants receives or, in the case of plants, comprises (up to 40% or more of the transformants), both vectors. In case of transformation with Agrobacteria, the transformants usually receive only a part of the vector, i.e. the sequence flanked by the T-DNA, which usually represents the expression cassette. The marker genes can subsequently be removed from the transformed plant by performing crosses. In another method, marker genes integrated into a transposon are used for the transformation together with desired nucleic acid (known as the Ac/Ds technology). The transformants can be crossed with a transposase source or the transformants are transformed with a nucleic acid construct conferring expression of a transposase, transiently or stable. In some cases (approx. 10%), the transposon jumps out of the genome of the host cell once transformation has taken place successfully and is lost. In a further number of cases, the transposon jumps to a different location. In these cases the marker gene must be eliminated by performing crosses. In microbiology, techniques were developed which make possible, or facilitate, the detection of such events. A further advantageous method relies on what is known as recombination systems; whose advantage is that elimination by crossing can be dispensed with. The best-known system of this type is what is known as the Cre/lox system. Cre1 is a recombinase that removes the sequences located between the loxP sequences. If the marker gene is integrated between the loxP sequences, it is removed once transformation has taken place successfully, by expression of the recombinase. Further recombination systems are the HIN/HIX, FLP/FRT and REP/STB system (Tribble et al., J. Biol. Chem., 275, 2000: 22255-22267; Velmurugan et al., J. Cell Biol., 149, 2000: 553-566). A site-specific integration into the plant genome of the nucleic acid sequences according to the invention is possible. Naturally, these methods can also be applied to microorganisms such as yeast, fungi or bacteria.

### Transgenic/Transgene/Recombinant

[0125] For the purposes of the invention, “transgenic”, “transgene” or “recombinant” means with regard to, for example, a nucleic acid sequence, an expression cassette, gene construct or a vector comprising the nucleic acid sequence or an organism transformed with the nucleic acid sequences, expression cassettes or vectors according to the invention, all those constructions brought about by recombinant methods in which either
[0126] (a) the nucleic acid sequences encoding proteins useful in the methods of the invention, or
[0127] (b) genetic control sequence(s) which is operably linked with the nucleic acid sequence according to the invention, for example a promoter, or
[0128] (c) a) and b)
   are not located in their natural genetic environment or have been modified by recombinant methods, it being possible for the modification to take the form of, for example, a substitution, addition, deletion, inversion or insertion of one or more nucleotide residues. The natural genetic environment is understood as meaning the natural genomic or chromosomal locus in the original plant or the presence in a genomic library. In the case of a genomic library, the natural genetic environment of the nucleic acid sequence is preferably retained, at least in part. The environment flanks the nucleic acid sequence at least on one side and has a sequence length of at least 50 bp, preferably at least 500 bp, especially preferably at least 1000 bp, most preferably at least 5000 bp. A naturally occurring expression cassette—for example the naturally occurring combination of the natural promoter of the nucleic acid sequences with the corresponding nucleic acid sequence encoding a polypeptide useful in the methods of the present invention, as defined above—becomes a transgenic expression cassette when this expression cassette is modified by non-natural, synthetic (“artificial”) methods such as, for example, mutagenic treatment. Suitable methods are described, for example, in U.S. Pat. No. 5,565,350 or WO 00/15815.

[0129] A transgenic plant for the purposes of the invention is thus understood as meaning, as above, that the nucleic acids used in the method of the invention are not at their natural locus in the genome of said plant, it being possible for the nucleic acids to be expressed homologously or heterologously. However, as mentioned, transgenic also means that, while the nucleic acids according to the invention or used in the inventive method are at their natural position in the genome of a plant, the sequence has been modified with regard to the natural sequence, and/or that the regulatory sequences of the natural sequences have been modified. Transgenic is preferably understood as meaning the expression of the nucleic acids according to the invention at an unnatural locus in the genome, i.e. homologous or, preferably, heterologous expression of the nucleic acids takes place. Preferred transgenic plants are mentioned herein.

### Transformation

[0130] The term “introduction” or “transformation” as referred to herein encompasses the transfer of an exogenous polynucleotide into a host cell, irrespective of the method used for transfer. Plant tissue capable of subsequent clonal propagation, whether by organogenesis or embryogenesis, may be transformed with a genetic construct of the present invention and a whole plant regenerated there from. The particular tissue chosen will vary depending on the clonal propagation systems available for, and best suited to, the particular species being transformed. Exemplary tissue targets include leaf disks, pollen, embryos, cotyledons, hypocotyls, megagametophytes, callus tissue, existing meristematic tissue (e.g., apical meristem, axillary buds, and root meristems), and induced meristem tissue (e.g., cotyledon meristem and hypocotyl meristem). The polynucleotide may be transiently or stably introduced into a host cell and may be maintained non-integrated, for example, as a plasmid. Alternatively, it may be integrated into the host genome. The resulting transformed plant cell may then be used to regenerate a transformed plant in a manner known to persons skilled in the art.

[0131] The transfer of foreign genes into the genome of a plant is called transformation. Transformation of plant species is now a fairly routine technique. Advantageously, any of several transformation methods may be used to introduce the gene of interest into a suitable ancestor cell. The methods described for the transformation and regeneration of plants from plant tissues or plant cells may be utilized for transient or for stable transformation. Transformation methods include the use of liposomes, electroporation, chemicals that increase free DNA uptake, injection of the DNA directly into the plant, particle gun bombardment, transformation using viruses or pollen and microprojection. Methods may be selected from the calcium/polyethylene glycol method for protoplasts (Krens, F. A. et al., (1982) Nature 296, 72-74; Negrutiu I et al. (1987) Plant Mol Biol 8: 363-373); electroporation of protoplasts (Shillito R. D. et al. (1985) Bio/Technol 3, 1099-1102); microinjection into plant material (Crossway A et al., (1986) Mol. Gen. Genet 202: 179-185); DNA or RNA-coated particle bombardment (Klein T M et al., (1987) Nature 327: 70) infection with (non-integrative) viruses and the like. Transgenic plants, including transgenic crop plants, are preferably produced via Agrobacterium-mediated transformation. An advantageous transformation method is the transformation in planta. To this end, it is possible, for example, to allow the agrobacteria to act on plant seeds or to inoculate the plant meristem with agrobacteria. It has proved particularly expedient in accordance with the invention to allow a suspension of transformed agrobacteria to act on the intact plant or at least on the flower primordia. The plant is subsequently grown on until the seeds of the treated plant are obtained (Clough and Bent, Plant J. (1998) 16, 735-743). Methods for Agrobacterium-mediated transformation of rice include well known methods for rice transformation, such as those described in any of the following: European patent application EP 1198985 A1, Aldemita and Hodges (Planta 199: 612-617, 1996); Chan et al. (Plant Mol Biol 22 (3): 491-506, 1993), Hiei et al. (Plant J 6 (2): 271-282, 1994), which disclosures are incorporated by reference herein as if fully set forth. In the case of corn transformation, the preferred method is as described in either Ishida et al. (Nat. Biotechnol 14(6): 745-50, 1996) or Frame et al. (Plant Physiol 129(1): 13-22, 2002), which disclosures are incorporated by reference herein as if fully set forth. Said methods are further described by way of example in B. Jenes et al., Techniques for Gene Transfer, in: Transgenic Plants, Vol. 1, Engineering and Utilization, eds. S. D. Kung and R. Wu, Academic Press (1993) 128-143 and in Potrykus Annu. Rev. Plant Physiol. Plant Molec. Biol. 42 (1991) 205-225). The nucleic acids or the construct to be expressed is preferably cloned into a vector, which is suitable for transforming Agrobacterium tumefaciens, for example pBinl9 (Bevan et al., Nucl. Acids Res. 12 (1984) 8711). Agrobacteria transformed by such a vector can then be used in known manner for the transformation of plants, such as plants used as a model, like Arabidopsis (Arabidopsis thaliana is within the scope of the present invention not considered as a crop plant), or crop plants such as, by way of example, tobacco plants, for example by immersing bruised leaves or chopped leaves in an agrobacterial solution and then culturing them in suitable media. The transformation of plants by means of Agrobacterium tumefaciens is described, for example, by Höfgen and Willmitzer in Nucl. Acid Res. (1988) 16, 9877 or is known inter alia from F. F. White, Vectors for Gene Transfer in Higher Plants; in Transgenic Plants, Vol. 1, Engineering and Utilization, eds. S. D. Kung and R. Wu, Academic Press, 1993, pp. 15-38.

[0132] In addition to the transformation of somatic cells, which then have to be regenerated into intact plants, it is also possible to transform the cells of plant meristems and in particular those cells which develop into gametes. In this case, the transformed gametes follow the natural plant development, giving rise to transgenic plants. Thus, for example, seeds of Arabidopsis are treated with agrobacteria and seeds are obtained from the developing plants of which a certain proportion is transformed and thus transgenic [Feldman, K A and Marks M D (1987). Mol Gen Genet. 208:274-289; Feldmann K (1992). In: C Koncz, N-H Chua and J Shell, eds, Methods in Arabidopsis Research. Word Scientific, Singapore, pp. 274-289]. Alternative methods are based on the repeated removal of the inflorescences and incubation of the excision site in the center of the rosette with transformed agrobacteria, whereby transformed seeds can likewise be obtained at a later point in time (Chang (1994). Plant J. 5: 551-558; Katavic (1994). Mol Gen Genet, 245: 363-370). However, an especially effective method is the vacuum infiltration method with its modifications such as the “floral dip” method. In the case of vacuum infiltration of Arabidopsis, intact plants under reduced pressure are treated with an agrobacterial suspension [Bechthold, N (1993). C R Acad Sci Paris Life Sci, 316: 1194-1199], while in the case of the “floral dip” method the developing floral tissue is incubated briefly with a surfactant-treated agrobacterial suspension [Clough, S J and Bent A F (1998) The Plant J. 16, 735-743]. A certain proportion of transgenic seeds are harvested in both cases, and these seeds can be distinguished from non-transgenic seeds by growing under the above-described selective conditions. In addition the stable transformation of plastids is of advantages because plastids are inherited maternally is most crops reducing or eliminating the risk of transgene flow through pollen. The transformation of the chloroplast genome is generally achieved by a process which has been schematically displayed in Klaus et al., 2004 [Nature Biotechnology 22 (2), 225-229]. Briefly the sequences to be transformed are cloned together with a selectable marker gene between flanking sequences homologous to the chloroplast genome. These homologous flanking sequences direct site specific integration into the plastome. Plastidal transformation has been described for many different plant species and an overview is given in Bock (2001) Transgenic plastids in basic research and plant biotechnology. J Mol. Biol. 2001 Sep. 21; 312 (3):425-38 or Maliga, P (2003) Progress towards commercialization of plastid transformation technology. Trends Biotechnol. 21, 20-28. Further biotechnological progress has recently been reported in form of marker free plastid transformants, which can be produced by a transient co-integrated maker gene (Klaus et al., 2004, Nature Biotechnology 22(2), 225-229).

### T-DNA Activation Tagging

[0133] T-DNA activation tagging (Hayashi et al. Science (1992) 1350-1353), involves insertion of T-DNA, usually containing a promoter (may also be a translation enhancer or an intron), in the genomic region of the gene of interest or 10 kb up- or downstream of the coding region of a gene in a configuration such that the promoter directs expression of the targeted gene. Typically, regulation of expression of the targeted gene by its natural promoter is disrupted and the gene falls under the control of the newly introduced promoter. The promoter is typically embedded in a T-DNA. This T-DNA is randomly inserted into the plant genome, for example, through Agrobacterium infection and leads to modified expression of genes near the inserted T-DNA. The resulting transgenic plants show dominant phenotypes due to modified expression of genes close to the introduced promoter.

### Tilling

[0134] The term “TILLING” is an abbreviation of “Targeted Induced Local Lesions In Genomes” and refers to a mutagenesis technology useful to generate and/or identify nucleic acids encoding proteins with modified expression and/or activity. TILLING also allows selection of plants carrying such mutant variants. These mutant variants may exhibit modified expression, either in strength or in location or in timing (if the mutations affect the promoter for example). These mutant variants may exhibit higher activity than that exhibited by the gene in its natural form. TILLING combines high-density mutagenesis with high-throughput screening methods. The steps typically followed in TILLING are: (a) EMS mutagenesis (Redei GP and Koncz C (1992) In Methods in Arabidopsis Research, Koncz C, Chua N H, Schell J, eds. Singapore, World Scientific Publishing Co, pp. 16-82; Feldmann et al., (1994) In Meyerowitz E M, Somerville CR, eds, Arabidopsis. Cold Spring Harbor Laboratory Press, Cold Spring Harbor, N.Y., pp 137-172; Lightner J and Caspar T (1998) In J Martinez-Zapater, J Salinas, eds, Methods on Molecular Biology, Vol. 82. Humana Press, Totowa, N.J., pp 91-104); (b) DNA preparation and pooling of individuals; (c) PCR amplification of a region of interest; (d) denaturation and annealing to allow formation of heteroduplexes; (e) DHPLC, where the presence of a heteroduplex in a pool is detected as an extra peak in the chromatogram; (f) identification of the mutant individual; and (g) sequencing of the mutant PCR product. Methods for TILLING are well known in the art (McCallum et al., (2000) Nat Biotechnol 18: 455-457; reviewed by Stemple (2004) Nat Rev Genet. 5(2): 145-50).

### Homologous Recombination

[0135] Homologous recombination allows introduction in a genome of a selected nucleic acid at a defined selected position. Homologous recombination is a standard technology used routinely in biological sciences for lower organisms such as yeast or the moss Physcomitrella. Methods for performing homologous recombination in plants have been described not only for model plants (Offring a et al. (1990) EMBO J. 9(10): 3077-84) but also for crop plants, for example rice (Terada et al. (2002) Nat Biotech 20(10): 1030-4; lida and Terada (2004) Curr Opin Biotech 15(2): 132-8).

### Yield

[0136] The term “yield” in general means a measurable produce of economic value, typically related to a specified crop, to an area, and to a period of time. Individual plant parts directly contribute to yield based on their number, size and/or weight, or the actual yield is the yield per acre for a crop and year, which is determined by dividing total production (includes both harvested and appraised production) by planted acres. The term “yield” of a plant may relate to vegetative biomass (root and/or shoot biomass), to reproductive organs, and/or to propagules (such as seeds) of that plant.

### Early Vigour

[0137] “Early vigour” refers to active healthy well-balanced growth especially during early stages of plant growth, and may result from increased plant fitness due to, for example, the plants being better adapted to their environment (i.e. optimizing the use of energy resources and partitioning between shoot and root). Plants having early vigour also show increased seedling survival and a better establishment of the crop, which often results in highly uniform fields (with the crop growing in uniform manner, i.e. with the majority of plants reaching the various stages of development at substantially the same time), and often better and higher yield. Therefore, early vigour may be determined by measuring various factors, such as thousand kernel weight, percentage germination, percentage emergence, seedling growth, seedling height, root length, root and shoot biomass and many more.

### Increase/Improve/Enhance

[0138] The terms “increase”, “improve” or “enhance” are interchangeable and shall mean in the sense of the application at least a 5%, 6%, 7%, 8%, 9% or 10%, preferably at least 15% or 20%, more preferably 25%, 30%, 35% or 40% more yield and/or growth in comparison to control plants as defined herein.

### Seed Yield

[0139] Increased seed yield may manifest itself as one or more of the following: a) an increase in seed biomass (total seed weight) which may be on an individual seed basis and/or per plant and/or per hectare or acre; b) increased number of flowers per plant; c) increased number of (filled) seeds; d) increased seed filling rate (which is expressed as the ratio between the number of filled seeds divided by the total number of seeds); e) increased harvest index, which is expressed as a ratio of the yield of harvestable parts, such as seeds, divided by the total biomass; and f) increased thousand kernel weight (TKW), which is extrapolated from the number of filled seeds counted and their total weight. An increased TKW may result from an increased seed size and/or seed weight, and may also result from an increase in embryo and/or endosperm size.

[0140] An increase in seed yield may also be manifested as an increase in seed size and/or seed volume. Furthermore, an increase in seed yield may also manifest itself as an increase in seed area and/or seed length and/or seed width and/or seed perimeter. Increased yield may also result in modified architecture, or may occur because of modified architecture.

### Greenness Index

[0141] The “greenness index” as used herein is calculated from digital images of plants. For each pixel belonging to the plant object on the image, the ratio of the green value versus the red value (in the RGB model for encoding color) is calculated. The greenness index is expressed as the percentage of pixels for which the green-to-red ratio exceeds a given threshold. Under normal growth conditions, under salt stress growth conditions, and under reduced nutrient availability growth conditions, the greenness index of plants is measured in the last imaging before flowering. In contrast, under drought stress growth conditions, the greenness index of plants is measured in the first imaging after drought.

### Plant

[0142] The term “plant” as used herein encompasses whole plants, ancestors and progeny of the plants and plant parts, including seeds, shoots, stems, leaves, roots (including tubers), flowers, and tissues and organs, wherein each of the aforementioned comprise the gene/nucleic acid of interest. The term “plant” also encompasses plant cells, suspension cultures, callus tissue, embryos, meristematic regions, gametophytes, sporophytes, pollen and microspores, again wherein each of the aforementioned comprises the gene/nucleic acid of interest.

[0143] Plants that are particularly useful in the methods of the invention include all plants which belong to the superfamily Viridiplantae, in particular monocotyledonous and dicotyledonous plants including fodder or forage legumes, ornamental plants, food crops, trees or shrubs selected from the list comprising Acer spp., Actinidia spp., Abelmoschus spp., Agave sisalana, Agropyron spp., Agrostis stolonifera, Allium spp., Amaranthus spp., Ammophila arenaria, Ananas comosus, Annona spp., Apium graveolens, Arachis spp, Artocarpus spp., Asparagus officinalis, Avena spp. (e.g. Avena sativa, Avena fatua, Avena byzantina, Avena fatua var. sativa, Avena hybrida), Averrhoa carambola, Bambusa sp., Benincasa hispida, Bertholletia excelsea, Beta vulgaris, Brassica spp. (e.g. Brassica napus, Brassica rapa ssp. [canola, oilseed rape, turnip rape]), Cadaba farinosa, Camellia sinensis, Canna indica, Cannabis sativa, Capsicum spp., Carex elata, Carica papaya, Carissa macrocarpa, Carya spp., Carthamus tinctorius, Castanea spp., Ceiba pentandra, Cichorium endivia, Cinnamomum spp., Citrullus lanatus, Citrus spp., Cocos spp., Coffea spp., Colocasia esculenta, Cola spp., Corchorus sp., Coriandrum sativum, Corylus spp., Crataegus spp., Crocus sativus, Cucurbita spp., Cucumis spp., Cynara spp., Daucus carota, Desmodium spp., Dimocarpus longan, Dioscorea spp., Diospyros spp., Echinochloa spp., Elaeis (e.g. Elaeis guineensis, Elaeis oleifera), Eleusine coracana, Erianthus sp., Eriobotrya japonica, Eucalyptus sp., Eugenia uniflora, Fagopyrum spp., Fagus spp., Festuca arundinacea, Ficus carica, Fortunella spp., Fragaria spp., Ginkgo biloba, Glycine spp. (e.g. Glycine max, Soja hispida or Soja max), Gossypium hirsutum, Helianthus spp. (e.g. Helianthus annuus), Hemerocallis fulva, Hibiscus spp., Hordeum spp. (e.g. Hordeum vulgare), Ipomoea batatas, Juglans spp., Lactuca sativa, Lathyrus spp., Lens culinaris, Linum usitatissimum, Litchi chinensis, Lotus spp., Luffa acutangula, Lupinus spp., Luzula sylvatica, Lycopersicon spp. (e.g. Lycopersicon esculentum, Lycopersicon lycopersicum, Lycopersicon pyriforme), Macrotyloma spp., Malus spp., Malpighia emarginata, Mammea americana, Mangifera indica, Manihot spp., Manilkara zapota, Medicago sativa, Melilotus spp., Mentha spp., Miscanthus sinensis, Momordica spp., Morus nigra, Musa spp., Nicotiana spp., Olea spp., Opuntia spp., Ornithopus spp., Oryza spp. (e.g. Oryza sativa, Oryza latifolia), Panicum miliaceum, Panicum virgatum, Passiflora edulis, Pastinaca sativa, Pennisetum sp., Persea spp., Petroselinum crispum, Phalaris arundinacea, Phaseolus spp., Phleum pratense, Phoenix spp., Phragmites australis, Physalis spp., Pinus spp., Pistacia vera, Pisum spp., Poa spp., Populus spp., Prosopis spp., Prunus spp., Psidium spp., Punica granatum, Pyrus communis, Quercus spp., Raphanus sativus, Rheum rhabarbarum, Ribes spp., Ricinus communis, Rubus spp., Saccharum spp., Salix sp., Sambucus spp., Secale cereale, Sesamum spp., Sinapis sp., Solanum spp. (e.g. Solanum tuberosum, Solanum integrifolium or Solanum lycopersicum), Sorghum bicolor, Spinacia spp., Syzygium spp., Tagetes spp., Tamarindus indica, Theobroma cacao, Trifolium spp., Triticosecale rimpaui, Triticum spp. (e.g. Triticum aestivum, Triticum durum, Triticum turgidum, Triticum hybernum, Triticum macha, Triticum sativum or Triticum vulgare), Tropaeolum minus, Tropaeolum majus, Vaccinium spp., Vicia spp., Vigna spp., Viola odorata, Vitis spp., Zea mays, Zizania palustris, Ziziphus spp., amongst others.

### DETAILED DESCRIPTION OF THE INVENTION

### ERLK

[0144] It has now been found that modulating expression in a plant of a nucleic acid encoding an extensin receptor-like kinase (ERLK) or a part thereof comprising at least the kinase domain and the transmembrane domain, gives plants having enhanced yield-related traits relative to control plants.

[0145] Therefore, according to a first embodiment, the invention provides a method for enhancing yield-related traits in plants relative to control plants, comprising modulating expression in a plant of a nucleic acid encoding an ERLK protein, or a part thereof.

[0146] A preferred method for modulating (preferably, increasing) expression of a nucleic acid encoding an extensin receptor-like kinase (ERLK) or a part thereof comprising at least the kinase domain and the transmembrane domain, is by introducing and expressing in a plant a nucleic acid encoding such an ERLK protein.

[0147] Any reference hereinafter to a “protein useful in the methods of the invention” is taken to mean an ERLK polypeptide as defined herein. Any reference hereinafter to a “nucleic acid useful in the methods of the invention” is taken to mean a nucleic acid capable of encoding such an ERLK polypeptide. The nucleic acid to be introduced into a plant (and therefore useful in performing the methods of the invention) is any nucleic acid encoding the type of protein which will now be described, hereafter also named “ERLK nucleic acid” or “ERLK gene”.

[0148] The ERLK protein useful in the methods of the present invention is an ERLK protein as defined by Shiu and Bleeker (2001). The term “ERLK protein” or “extensin receptor-like kinase” refers to a protein comprising a kinase domain and N-terminally thereof a transmembrane domain (see FIG. 1 and FIG. 2 for a schematic overview). ERLK proteins preferably also comprise an N-terminal secretion signal sequence and optionally an extracellular domain. Preferably the kinase domain (and/or other domains) of the ERLK protein useful in the present invention classifies as an extensin receptor-like kinase as defined by Shiu and Bleeker (2001).

[0149] The term “domain” and “motif” is defined in the “definitions” section herein. Specialist databases exist for the identification of domains, for example, SMART (Schultz et al. (1998) Proc. Natl. Acad. Sci. USA 95, 5857-5864; Letunic et al. (2002) Nucleic Acids Res 30, 242-244, InterPro (Mulder et al., (2003) Nucl. Acids. Res. 31, 315-318, Prosite (Bucher and Bairoch (1994), A generalized profile syntax for biomolecular sequences motifs and its function in automatic sequence interpretation. (In) ISMB-94; Proceedings 2nd International Conference on Intelligent Systems for Molecular Biology. Altman R., Brutlag D., Karp P., Lathrop R., Searls D., Eds., pp 53-61, AAAI Press, Menlo Park; Hulo et al., Nucl. Acids. Res. 32:D134-D137, (2004), or Pfam (Bateman et al., Nucleic Acids Research 30(1): 276-280 (2002). A set of tools for in silico analysis of protein sequences is available on the ExPASy proteomics server (Swiss Institute of Bioinformatics (Gasteiger et al., ExPASy: the proteomics server for in-depth protein knowledge and analysis, Nucleic Acids Res. 31:3784-3788 (2003)). Domains may also be identified using routine techniques, such as by sequence alignment.

[0150] Methods for the alignment of sequences for comparison are well known in the art, such methods include GAP, BESTFIT, BLAST, FASTA and TFASTA. GAP uses the algorithm of Needleman and Wunsch ((1970) J Mol Biol 48: 443-453) to find the global (i.e. spanning the complete sequences) alignment of two sequences that maximizes the number of matches and minimizes the number of gaps. The BLAST algorithm (Altschul et al. (1990) J Mol Biol 215: 403-10) calculates percent sequence identity and performs a statistical analysis of the similarity between the two sequences. The software for performing BLAST analysis is publicly available through the National Centre for Biotechnology Information (NCBI). Homologues may readily be identified using, for example, the ClustalW multiple sequence alignment algorithm (version 1.83), with the default pairwise alignment parameters, and a scoring method in percentage. Global percentages of similarity and identity may also be determined using one of the methods available in the MatGAT software package (Campanella et al., BMC Bioinformatics. 2003 Jul. 10; 4:29. MatGAT: an application that generates similarity/identity matrices using protein or DNA sequences.). Minor manual editing may be performed to optimise alignment between conserved motifs, as would be apparent to a person skilled in the art. Furthermore, instead of using full-length sequences for the identification of homologues, specific domains (such as the kinase domain) may also be used. The sequence identity values may be determined over the entire nucleic acid or amino acid sequence or over selected domains or conserved motif(s), using the programs mentioned above using the default parameters.

[0151] The kinase domain in ERLK proteins useful in the methods of the present invention is a protein Tyr kinase type domain (Pfam entry PF07714, InterPro entry IPR001245). The active site corresponds to the PROSITE signature PS00109, with the following consensus pattern: [LIVMFYC]-{A}-[HY]-x-D -[LIVMFY]-[RSTAC]-{D}-{PF}-N -[LIVMFYC](3), wherein D is part of the active site. The syntax of this pattern is according to the conventions used in the Prosite database and is explained in the PROSITE manual. Preferably, the kinase domain is furthermore characterised by the presence of sequence motif 1 (SEQ ID NO: 6):

(M/L) L (S/G/R) R (L/M) (H/R/Q) (H/S/C) (R/P)
(N/Y) L (L/V) XL (I/L/V) G

wherein X may be any amino acid, preferably one of K, N, A, S, G, E. Preferably, motif 1 has the sequence LLSR(L/M) (H/R/Q) (C/S)PYL(L/V) (E/G/A)L(L/I); most preferably motif 1 has the sequence LLSRLQCPYLVELLG.

[0152] Preferably, the kinase domain also comprises one or more of sequence motif 2 (SEQ ID NO: 7):

L (Y/D/N) (W/F) X (A/V/T) R (L/M) (L/R/G) IA (L/V)

wherein X may be any amino acid, preferably one of D, N, E, K, P, Q, or G, sequence motif 3 (SEQ ID NO: 8):

A (R/K) (A/G) L (A/E) (Y/F) LHE,

sequence motif 4 (SEQ ID NO: 9):

(V/I) IHR (D/N) (F/L) K (S/A/G/C) (S/T) N (I/V) LL
(E/D)

wherein the amino acid on position 6 is preferably not I, V or M, sequence motif 5 (SEQ ID NO: 10):

(K/R) V (S/A/T) DFG (L/M/S)

[0153] Preferably, sequence motif 2 has the sequence LDW(G/Q/P/E) (A/T)R(L/M) (R/G) IA(L/V), more preferably, sequence motif 2 has the sequence LDW (G/Q) (T/A) RL (R/G) IAL, most preferably, sequence motif 2 has the sequence LDWGARLRIAL. Sequence motif 3 preferably has the sequence ARALEFLHE. Sequence motif 4 preferably has the sequence VIHR (D/N) (F/L) K (S/C) (S/T) NILLD, most preferably, the sequence is VIHRNFKCTNILLD. Sequence motif 5 preferably has the sequence (K/R) VSDFG (L/M), most preferably the sequence is KVSDFGL.

[0154] Preferably, the kinase domain of ERLK proteins useful in the methods of the present invention have, in increasing order of preference, at least 39%, 40%, 45%, 50%, 55%, 60%, 65%, 70%, 75%, 80%, 85%, 90%, 95%, 96%, 97%, 98% or 99% sequence identity to the kinase domain of SEQ ID NO: 2 (as given in SEQ ID NO: 57). A kinase domain may be identified using the databases and tools for protein identification listed above, and/or methods for the alignment of sequences for comparison. In some instances, default parameters may be adjusted to modify the stringency of the search. For example using BLAST, the statistical significance threshold (called “expect” value) for reporting matches against database sequences may be increased to show less stringent matches. In this way, short nearly exact matches may be identified.

[0155] Transmembrane domains are about 15 to 30 amino acids long and are usually composed of hydrophobic residues that form an alpha helix. They are usually predicted on the basis of hydrophobicity (for example Klein et al., Biochim. Biophys. Acta 815, 468, 1985; or Sonnhammer et al., In J. Glasgow, T. Littlejohn, F. Major, R. Lathrop, D. Sankoff, and C. Sensen, editors, Proceedings of the Sixth International Conference on Intelligent Systems for Molecular Biology, pages 175-182, Menlo Park, Calif., 1998, AAAI Press).

[0156] The extracellular domain of an ERLK protein, if present, may (but not necessarily need to) have one or more SPx motifs. The structure of secretion signal sequences and the prediction of its cleavage sites are well known in the art.

[0157] Furthermore, ERLK proteins useful in the methods of the present invention (at least in their native form) typically, but not necessarily, have kinase activity. Therefore, ERLK proteins with reduced kinase activity or without kinase activity may equally be useful in the methods of the present invention. A person skilled in the art may easily determine the presence of kinase activity using routine tools and techniques. To determine the kinase activity of receptor like kinases, several assays are available (for example Current Protocols in Molecular Biology, Volumes 1 and 2, Ausubel et al. (1994), Current Protocols). In brief, a kinase assay generally involves (1) bringing the kinase protein into contact with a substrate polypeptide containing the target site to be phosphorylated; (2) allowing phosphorylation of the target site in an appropriate kinase buffer under appropriate conditions; (3) separating phosphorylated products from non-phosphorylated substrate after a suitable reaction period. The presence or absence of kinase activity is determined by the presence or absence of a phosphorylated target. In addition, quantitative measurements can be performed. Purified receptor like kinase, or cell extracts containing or enriched in the receptor like kinase could be used as source for the kinase protein. Alternatively, the approach of Zhao et al. (Plant Mol. Biol. 26, 791-803, 1994) could be used, where the cytoplasmic domain of a rice receptor like kinase was expressed in Escherichia coli and assayed for kinase activity. As a substrate, small peptides are particularly well suited. The peptide must comprise one or more serine, threonine or tyrosine residues in a phosphorylation site motif. A compilation of phosphorylation sites can be found in Biochimica et Biophysica Acta 1314, 191-225, (1996). In addition, the peptide substrates may advantageously have a net positive charge to facilitate binding to phosphocellulose filters, (allowing to separate the phosphorylated from non-phosphorylated peptides and to detect the phosphorylated peptides). If a phosphorylation site motif is not known, a general tyrosine kinase substrate can be used. For example, “Src-related peptide” (RRLIEDAEYAARG) is a substrate for many receptor and non-receptor tyrosine kinases). To determine the kinetic parameters for phosphorylation of the synthetic peptide, a range of peptide concentrations is required. For initial reactions, a peptide concentration of 0.7-1.5 mM could be used. For each kinase enzyme, it is important to determine the optimal buffer, ionic strength, and pH for activity. A standard 5×Kinase Buffer generally contains 5 mg/ml BSA (Bovine Serum Albumin preventing kinase adsorption to the assay tube), 150 mM Tris-Cl (pH 7.5), 100 mM MgCl₂. Divalent cations are required for most tyrosine kinases, although some tyrosine kinases (for example, insulin-, IGF-1-, and PDGF receptor kinases) require MnCl₂ instead of MgCl₂ (or in addition to MgCl₂). The optimal concentrations of divalent cations must be determined empirically for each protein kinase. A commonly used donor for the phosphoryl group is radio-labelled [gamma-³²P]ATP (normally at 0.2 mM final concentration). The amount of ³²P incorporated in the peptides may be determined by measuring activity on the nitrocellulose dry pads in a scintillation counter.

[0158] The present invention is illustrated by transforming plants with the nucleic acid sequence represented by SEQ ID NO: 1, encoding the polypeptide sequence of SEQ ID NO: 2. However, performance of the invention is not restricted to these sequences; the methods of the invention may advantageously be performed using any ERLK-encoding nucleic acid or ERLK polypeptide as defined herein.

[0159] Examples of nucleic acids encoding ERLK polypeptides are given in Table A of Example 1 herein. Such nucleic acids are useful in performing the methods of the invention. The amino acid sequences given in Table A of Example 1 are example sequences of orthologues and paralogues of the ERLK polypeptide represented by SEQ ID NO: 2, the terms “orthologues” and “paralogues” being as defined herein. Further orthologues and paralogues may readily be identified by performing a so-called reciprocal blast search. Typically, this involves a first BLAST involving BLASTing a query sequence (for example using any of the sequences listed in Table A of Example 1) against any sequence database, such as the publicly available NCBI database. BLASTN or TBLASTX (using standard default values) are generally used when starting from a nucleotide sequence, and BLASTP or TBLASTN (using standard default values) when starting from a protein sequence. The BLAST results may optionally be filtered. The full-length sequences of either the filtered results or non-filtered results are then BLASTed back (second BLAST) against sequences from the organism from which the query sequence is derived (where the query sequence is SEQ ID NO: 1, SEQ ID NO: 2, SEQ ID NO: 11, SEQ ID NO: 12, SEQ ID NO: 13 or SEQ ID NO: 14, the second BLAST would therefore be against Arabidopsis sequences). The results of the first and second BLASTs are then compared. A paralogue is identified if a high-ranking hit from the first blast is from the same species as from which the query sequence is derived, a BLAST back then ideally results in the query sequence amongst the highest hits; an orthologue is identified if a high-ranking hit in the first BLAST is not from the same species as from which the query sequence is derived, and preferably results upon BLAST back in the query sequence being among the highest hits.

[0160] High-ranking hits are those having a low E-value. The lower the E-value, the more significant the score (or in other words the lower the chance that the hit was found by chance). Computation of the E-value is well known in the art. In addition to E-values, comparisons are also scored by percentage identity. Percentage identity refers to the number of identical nucleotides (or amino acids) between the two compared nucleic acid (or polypeptide) sequences over a particular length. In the case of large families, ClustalW may be used, followed by a neighbour joining tree, to help visualize clustering of related genes and to identify orthologues and paralogues.

[0161] Nucleic acid variants may also be useful in practising the methods of the invention. Examples of such variants include nucleic acids encoding homologues and derivatives of any one of the amino acid sequences given in Table A of Example 1, the terms “homologue” and “derivative” being as defined herein. Also useful in the methods of the invention are nucleic acids encoding homologues and derivatives of orthologues or paralogues of any one of the amino acid sequences given in Table A of Example 1. Homologues and derivatives useful in the methods of the present invention have substantially the same biological and functional activity as the unmodified protein from which they are derived.

[0162] Further nucleic acid variants useful in practising the methods of the invention include portions of nucleic acids encoding ERLK polypeptides, nucleic acids hybridising to nucleic acids encoding ERLK polypeptides, splice variants of nucleic acids encoding ERLK polypeptides, allelic variants of nucleic acids encoding ERLK polypeptides and variants of nucleic acids encoding ERLK polypeptides obtained by gene shuffling. The terms hybridising sequence, splice variant, allelic variant and gene shuffling are as described herein.

[0163] Nucleic acids encoding ERLK polypeptides need not be full-length nucleic acids, since performance of the methods of the invention does not rely on the use of full-length nucleic acid sequences. According to the present invention, there is provided a method for enhancing yield-related traits in plants, comprising introducing and expressing in a plant a portion of any one of the nucleic acid sequences given in Table A of Example 1, or a portion of a nucleic acid encoding an orthologue, paralogue or homologue of any of the amino acid sequences given in Table A of Example 1. Preferably, the portion encodes a polypeptide comprising at least, from N-terminus to C-terminus, (i) a transmembrane domain and (ii) an extensin receptor-like kinase-type (ERLK-type) kinase domain.

[0164] A portion of a nucleic acid may be prepared, for example, by making one or more deletions to the nucleic acid. The portions may be used in isolated form or they may be fused to other coding (or non-coding) sequences in order to, for example, produce a protein that combines several activities. When fused to other coding sequences, the resultant polypeptide produced upon translation may be bigger than that predicted for the protein portion.

[0165] Portions useful in the methods of the invention, encode a ERLK polypeptide as defined herein, having a kinase domain (as described above) and having substantially the same biological activity as the ERLK protein represented by any of the amino acid sequences given in Table A of Example 1. Preferably, the portion is a portion of any one of the nucleic acids given in Table

[0166] A of Example 1, or is a portion of a nucleic acid encoding an orthologue or paralogue of any one of the amino acid sequences given in Table A of Example 1. Preferably the portion is at least 800, 850, 900, 950, 1000, 1050, 1100, 1150, 1200, 1250, 1300 consecutive nucleotides in length, the consecutive nucleotides being of any one of the nucleic acid sequences given in Table A of Example 1, or of a nucleic acid encoding an orthologue or paralogue of any one of the amino acid sequences given in Table A of Example 1. Most preferably the portion is a portion of the nucleic acid of SEQ ID NO: 1.

[0167] Another nucleic acid variant useful in the methods of the invention is a nucleic acid capable of hybridising, under reduced stringency conditions, preferably under stringent conditions, with a nucleic acid encoding an ERLK polypeptide as defined herein, or with a portion as defined herein.

[0168] According to the present invention, there is provided a method for enhancing yield-related traits in plants, comprising introducing and expressing in a plant a nucleic acid capable of hybridizing to any one of the nucleic acids given in Table A of Example 1, or comprising introducing and expressing in a plant a nucleic acid capable of hybridising to a nucleic acid encoding an orthologue, paralogue or homologue of any of the nucleic acid sequences given in Table A of Example 1.

[0169] Hybridising sequences useful in the methods of the invention encode an ERLK polypeptide as defined herein, having an ERLK-type kinase domain and a transmembrane domain (as described above), and having substantially the same biological activity as the amino acid sequences given in Table A of Example 1. The hybridising sequence is typically at least 800 nucleotides in length, preferably at least 1000 nucleotides in length, more preferably at least 1200 nucleotides in length and most preferably at least 1300 nucleotides in length. Preferably, the hybridising sequence is capable of hybridising to any one of the nucleic acids given in Table A of Example 1, or to a portion of any of these sequences, a portion being as defined above, or the hybridising sequence is capable of hybridising to a nucleic acid encoding an orthologue or paralogue of any one of the amino acid sequences given in Table A of Example 1, or to probes, or to probes derived therefrom. Most preferably, the hybridising sequence is capable of hybridising to a nucleic acid as represented by SEQ ID NO: 1 or to a portion or probe thereof.

[0170] Methods for designing probes are well known in the art. Probes are generally less than 1000 bp in length, preferably less than 500 bp in length. Commonly, probe lengths for DNA-DNA hybridisations such as Southern blotting, vary between 100 and 500 bp, whereas the hybridising region in probes for DNA-DNA hybridisations such as in PCR amplification generally are shorter than 50 but longer than 10 nucleotides.

[0171] Another nucleic acid variant useful in the methods of the invention is a splice variant encoding an ERLK polypeptide as defined hereinabove, a splice variant being as defined herein.

[0172] According to the present invention, there is provided a method for enhancing yield-related traits in plants, comprising introducing and expressing in a plant a splice variant of any one of the nucleic acid sequences given in Table A of Example 1, or a splice variant of a nucleic acid encoding an orthologue, paralogue or homologue of any of the amino acid sequences given in Table A of Example 1.

[0173] Preferred splice variants are splice variants of a nucleic acid represented by SEQ ID NO: 1, or a splice variant of a nucleic acid encoding an orthologue or paralogue of SEQ ID NO: 2.

[0174] Another nucleic acid variant useful in performing the methods of the invention is an allelic variant of a nucleic acid encoding an ERLK polypeptide as defined hereinabove, an allelic variant being as defined herein.

[0175] According to the present invention, there is provided a method for enhancing yield-related traits in plants, comprising introducing and expressing in a plant an allelic variant of any one of the nucleic acids given in Table A of Example 1, or comprising introducing and expressing in a plant an allelic variant of a nucleic acid encoding an orthologue, paralogue or homologue of any of the amino acid sequences given in Table A of Example 1.

[0176] The allelic variants useful in the methods of the present invention have substantially the same biological activity as the ERLK polypeptide of SEQ ID NO: 2 and any of the amino acids depicted in Table A of Example 1. Allelic variants exist in nature, and encompassed within the methods of the present invention is the use of these natural alleles. Preferably, the allelic variant is an allelic variant of SEQ ID NO: 1 or an allelic variant of a nucleic acid encoding an orthologue or paralogue of SEQ ID NO: 2.

[0177] A further nucleic acid variant useful in the methods of the invention is a nucleic acid variant obtained by gene shuffling. Gene shuffling or directed evolution may also be used to generate variants of nucleic acids encoding ERLK polypeptides as defined above; the term “gene shuffling” being as defined herein.

[0178] According to the present invention, there is provided a method for enhancing yield-related traits in plants, comprising introducing and expressing in a plant a variant of any one of the nucleic acid sequences given in Table A of Example 1, or comprising introducing and expressing in a plant a variant of a nucleic acid encoding an orthologue, paralogue or homologue of any of the amino acid sequences given in Table A of Example 1, which variant nucleic acid is obtained by gene shuffling.

[0179] Furthermore, nucleic acid variants may also be obtained by site-directed mutagenesis. Several methods are available to achieve site-directed mutagenesis, the most common being PCR based methods (Current Protocols in Molecular Biology. Wiley Eds.).

[0180] Nucleic acids encoding ERLK polypeptides may be derived from any natural or artificial source. The nucleic acid may be modified from its native form in composition and/or genomic environment through deliberate human manipulation. Preferably the ERLK polypeptide-encoding nucleic acid is from a plant, further preferably from a dicotyledonous plant, more preferably from the family Brassicaceae, most preferably the nucleic acid is from Arabidopsis thaliana.

[0181] Performance of the methods of the invention gives plants having enhanced yield-related traits. In particular performance of the methods of the invention gives plants having increased yield, especially increased seed yield relative to control plants. The terms “yield” and “seed yield” are described in more detail in the “definitions” section herein.

[0182] Reference herein to enhanced yield-related traits is taken to mean an increase in biomass (weight) of one or more parts of a plant, which may include aboveground (harvestable) parts and/or (harvestable) parts below ground. In particular, such harvestable parts are seeds and leafy biomass, and performance of the methods of the invention results in plants having increased leafy biomass and increased seed yield, relative to control plants.

[0183] Taking corn as an example, a yield increase may be manifested as one or more of the following: increase in the number of plants established per hectare or acre, an increase in the number of ears per plant, an increase in the number of rows, number of kernels per row, kernel weight, thousand kernel weight, ear length/diameter, increase in the seed filling rate (which is the number of filled seeds divided by the total number of seeds and multiplied by 100), among others. Taking rice as an example, a yield increase may manifest itself as an increase in one or more of the following: number of plants per hectare or acre, number of panicles per plant, number of spikelets per panicle, number of flowers (florets) per panicle (which is expressed as a ratio of the number of filled seeds over the number of primary panicles), increase in the seed filling rate (which is the number of filled seeds divided by the total number of seeds and multiplied by 100), increase in thousand kernel weight, among others.

[0184] The present invention provides a method for increasing yield, especially increased leafy biomass and increased seed yield of plants, relative to control plants, which method comprises modulating expression, preferably increasing expression, in a plant of a nucleic acid encoding a ERLK polypeptide as defined herein.

[0185] Since the transgenic plants according to the present invention have increased yield, it is likely that these plants exhibit an increased growth rate (during at least part of their life cycle), relative to the growth rate of control plants at a corresponding stage in their life cycle.

[0186] The increased growth rate may be specific to one or more parts of a plant (including seeds), or may be throughout substantially the whole plant. Plants having an increased growth rate may have a shorter life cycle. The life cycle of a plant may be taken to mean the time needed to grow from a dry mature seed up to the stage where the plant has produced dry mature seeds, similar to the starting material. This life cycle may be influenced by factors such as early vigour, growth rate, greenness index, flowering time and speed of seed maturation. The increase in growth rate may take place at one or more stages in the life cycle of a plant or during substantially the whole plant life cycle. Increased growth rate during the early stages in the life cycle of a plant may reflect enhanced vigour. Increased growth rate during the early stages in the life cycle of a plant may reflect enhanced vigour. The increase in growth rate may alter the harvest cycle of a plant allowing plants to be sown later and/or harvested sooner than would otherwise be possible (a similar effect may be obtained with earlier flowering time). If the growth rate is sufficiently increased, it may allow for the further sowing of seeds of the same plant species (for example sowing and harvesting of rice plants followed by sowing and harvesting of further rice plants all within one conventional growing period). Similarly, if the growth rate is sufficiently increased, it may allow for the further sowing of seeds of different plants species (for example the sowing and harvesting of corn plants followed by, for example, the sowing and optional harvesting of soybean, potato or any other suitable plant). Harvesting additional times from the same rootstock in the case of some crop plants may also be possible. Altering the harvest cycle of a plant may lead to an increase in annual biomass production per acre (due to an increase in the number of times (say in a year) that any particular plant may be grown and harvested). An increase in growth rate may also allow for the cultivation of transgenic plants in a wider geographical area than their wild-type counterparts, since the territorial limitations for growing a crop are often determined by adverse environmental conditions either at the time of planting (early season) or at the time of harvesting (late season). Such adverse conditions may be avoided if the harvest cycle is shortened. The growth rate may be determined by deriving various parameters from growth curves, such parameters may be: T-Mid (the time taken for plants to reach 50% of their maximal size) and T-90 (time taken for plants to reach 90% of their maximal size), amongst others.

[0187] According to a preferred feature of the present invention, performance of the methods of the invention gives plants having an increased growth rate relative to control plants. Therefore, according to the present invention, there is provided a method for increasing the growth rate of plants, which method comprises modulating expression, preferably increasing expression, in a plant of a nucleic acid encoding an ERLK polypeptide as defined herein.

[0188] An increase in yield and/or growth rate occurs whether the plant is under non-stress conditions or whether the plant is exposed to various stresses compared to control plants. Plants typically respond to exposure to stress by growing more slowly. In conditions of severe stress, the plant may even stop growing altogether. Mild stress on the other hand is defined herein as being any stress to which a plant is exposed which does not result in the plant ceasing to grow altogether without the capacity to resume growth. Mild stress in the sense of the invention leads to a reduction in the growth of the stressed plants of less than 40%, 35% or 30%, preferably less than 25%, 20% or 15%, more preferably less than 14%, 13%, 12%, 11% or 10% or less in comparison to the control plant under non-stress conditions. Due to advances in agricultural practices (irrigation, fertilization, pesticide treatments) severe stresses are not often encountered in cultivated crop plants. As a consequence, the compromised growth induced by mild stress is often an undesirable feature for agriculture. Mild stresses are the everyday biotic and/or abiotic (environmental) stresses to which a plant is exposed. Abiotic stresses may be due to drought or excess water, anaerobic stress, salt stress, chemical toxicity, oxidative stress and hot, cold or freezing temperatures. The abiotic stress may be an osmotic stress caused by a water stress (particularly due to drought), salt stress, oxidative stress or an ionic stress. Biotic stresses are typically those stresses caused by pathogens, such as bacteria, viruses, fungi and insects.

[0189] In particular, the methods of the present invention may be performed under non-stress conditions or under conditions of mild drought to give plants having increased yield relative to control plants. As reported in Wang et al. (Planta (2003) 218: 1-14), abiotic stress leads to a series of morphological, physiological, biochemical and molecular changes that adversely affect plant growth and productivity. Drought, salinity, extreme temperatures and oxidative stress are known to be interconnected and may induce growth and cellular damage through similar mechanisms. Rabbani et al. (Plant Physiol (2003) 133: 1755-1767) describes a particularly high degree of “cross talk” between drought stress and high-salinity stress. For example, drought and/or salinisation are manifested primarily as osmotic stress, resulting in the disruption of homeostasis and ion distribution in the cell. Oxidative stress, which frequently accompanies high or low temperature, salinity or drought stress, may cause denaturing of functional and structural proteins. As a consequence, these diverse environmental stresses often activate similar cell signalling pathways and cellular responses, such as the production of stress proteins, up-regulation of anti-oxidants, accumulation of compatible solutes and growth arrest. The term “non-stress” conditions as used herein are those environmental conditions that allow optimal growth of plants. Persons skilled in the art are aware of normal soil conditions and climatic conditions for a given location.

[0190] Performance of the methods of the invention gives plants grown under non-stress conditions or under mild drought conditions increased yield relative to control plants grown under comparable conditions. Therefore, according to the present invention, there is provided a method for increasing yield in plants grown under non-stress conditions or under mild drought conditions, which method comprises increasing expression in a plant of a nucleic acid encoding an ERLK polypeptide.

[0191] Performance of the methods of the invention gives plants grown under conditions of nutrient deficiency, particularly under conditions of nitrogen deficiency, increased yield relative to control plants grown under comparable conditions. Therefore, according to the present invention, there is provided a method for increasing yield in plants grown under conditions of nutrient deficiency, which method comprises increasing expression in a plant of a nucleic acid encoding an ERLK polypeptide. Nutrient deficiency may result from a lack or excess of nutrients such as nitrogen, phosphates and other phosphorous-containing compounds, potassium, calcium, cadmium, magnesium, manganese, iron and boron, amongst others.

[0192] The present invention encompasses plants or parts thereof (including seeds) obtainable by the methods according to the present invention. The plants or parts thereof comprise a nucleic acid transgene encoding an ERLK polypeptide as defined above.

[0193] The invention also provides genetic constructs and vectors to facilitate introduction and/or expression in plants of nucleic acids encoding ERLK polypeptides. The gene constructs may be inserted into vectors, which may be commercially available, suitable for transforming into plants and suitable for expression of the gene of interest in the transformed cells. The invention also provides use of a gene construct as defined herein in the methods of the invention.

[0194] More specifically, the present invention provides a construct comprising:
[0195] (a) a nucleic acid encoding an ERLK polypeptide as defined above;
[0196] (b) one or more control sequences capable of driving expression of the nucleic acid sequence of (a); and optionally
[0197] (c) a transcription termination sequence.

[0198] Preferably, the nucleic acid encoding an ERLK polypeptide is as defined above. The term “control sequence” and “termination sequence” are as defined herein.

[0199] Plants are transformed with a vector comprising any of the nucleic acids described above. The skilled artisan is well aware of the genetic elements that must be present on the vector in order to successfully transform, select and propagate host cells containing the sequence of interest. The sequence of interest is operably linked to one or more control sequences (at least to a promoter).

[0200] Advantageously, any type of promoter, whether natural or synthetic, may be used to drive expression of the nucleic acid sequence. A constitutive promoter is particularly useful in the methods. See the “Definitions” section herein for definitions of the various promoter types. A preferred constitutive promoter is a constitutive promoter that is also substantially ubiquitously expressed. Further preferably the promoter is derived from a plant, more preferably a monocotyledonous plant. Most preferred is use of a GOS2 promoter, substantially similar or identical to the GOS2 promoter from rice (SEQ ID NO: 5 or SEQ ID NO: 58).

[0201] It should be clear that the applicability of the present invention is not restricted to the ERLK polypeptide-encoding nucleic acid represented by SEQ ID NO: 1, nor is the applicability of the invention restricted to expression of an ERLK polypeptide-encoding nucleic acid when driven by a constitutive promoter. See Table 2a in the “Definitions” section herein for further examples of constitutive promoters.

[0202] Optionally, one or more terminator sequences may be used in the construct introduced into a plant. Additional regulatory elements may include transcriptional as well as translational enhancers. Those skilled in the art will be aware of terminator and enhancer sequences that may be suitable for use in performing the invention. An intron sequence may also be added to the 5′ untranslated region (UTR) or in the coding sequence to increase the amount of the mature message that accumulates in the cytosol, as described in the definitions section. Other control sequences (besides promoter, enhancer, silencer, intron sequences, 3′UTRand/or 5′UTR regions) may be protein and/or RNA stabilizing elements. Such sequences would be known or may readily be obtained by a person skilled in the art.

[0203] The genetic constructs of the invention may further include an origin of replication sequence that is required for maintenance and/or replication in a specific cell type. One example is when a genetic construct is required to be maintained in a bacterial cell as an episomal genetic element (e.g. plasmid or cosmid molecule). Preferred origins of replication include, but are not limited to, the f1-ori and colE1.

[0204] For the detection of the successful transfer of the nucleic acid sequences as used in the methods of the invention and/or selection of transgenic plants comprising these nucleic acids, it is advantageous to use marker genes (or reporter genes). Therefore, the genetic construct may optionally comprise a selectable marker gene. Selectable markers are described in more detail in the “definitions” section herein. The marker genes may be removed or excised from the transgenic cell once they are no longer needed. Techniques for marker gene removal are known in the art, useful techniques are described above in the definitions section.

[0205] The invention also provides a method for the production of transgenic plants having enhanced yield-related traits relative to control plants, comprising introduction and expression in a plant of any nucleic acid encoding an ERLK polypeptide as defined hereinabove.

[0206] More specifically, the present invention provides a method for the production of transgenic plants having increased enhanced yield-related traits, particularly increased leafy biomass and seed yield, which method comprises:
[0207] (i) introducing and expressing in a plant or plant cell an ERLK polypeptide-encoding nucleic acid; and
[0208] (ii) cultivating the plant cell under conditions promoting plant growth and development.

[0209] The nucleic acid of (i) may be any of the nucleic acids capable of encoding an ERLK polypeptide as defined herein.

[0210] The nucleic acid may be introduced directly into a plant cell or into the plant itself (including introduction into a tissue, organ or any other part of a plant). According to a preferred feature of the present invention, the nucleic acid is preferably introduced into a plant by transformation. The term “transformation” is described in more detail in the “definitions” section herein.

[0211] The genetically modified plant cells can be regenerated via all methods with which the skilled worker is familiar. Suitable methods can be found in the abovementioned publications by S. D. Kung and R. Wu, Potrykus or Höfgen and Willmitzer.

[0212] Generally after transformation, plant cells or cell groupings are selected for the presence of one or more markers which are encoded by plant-expressible genes co-transferred with the gene of interest, following which the transformed material is regenerated into a whole plant. To select transformed plants, the plant material obtained in the transformation is, as a rule, subjected to selective conditions so that transformed plants can be distinguished from untransformed plants. For example, the seeds obtained in the above-described manner can be planted and, after an initial growing period, subjected to a suitable selection by spraying. A further possibility consists in growing the seeds, if appropriate after sterilization, on agar plates using a suitable selection agent so that only the transformed seeds can grow into plants. Alternatively, the transformed plants are screened for the presence of a selectable marker such as the ones described above.

[0213] Following DNA transfer and regeneration, putatively transformed plants may also be evaluated, for instance using Southern analysis, for the presence of the gene of interest, copy number and/or genomic organisation. Alternatively or additionally, expression levels of the newly introduced DNA may be monitored using Northern and/or Western analysis, both techniques being well known to persons having ordinary skill in the art.

[0214] The generated transformed plants may be propagated by a variety of means, such as by clonal propagation or classical breeding techniques. For example, a first generation (or T1) transformed plant may be selfed and homozygous second-generation (or T2) transformants selected, and the T2 plants may then further be propagated through classical breeding techniques. The generated transformed organisms may take a variety of forms. For example, they may be chimeras of transformed cells and non-transformed cells; clonal transformants (e.g., all cells transformed to contain the expression cassette); grafts of transformed and untransformed tissues (e.g., in plants, a transformed rootstock grafted to an untransformed scion).

[0215] The present invention clearly extends to any plant cell or plant produced by any of the methods described herein, and to all plant parts and propagules thereof. The present invention extends further to encompass the progeny of a primary transformed or transfected cell, tissue, organ or whole plant that has been produced by any of the aforementioned methods, the only requirement being that progeny exhibit the same genotypic and/or phenotypic characteristic(s) as those produced by the parent in the methods according to the invention.

[0216] The invention also includes host cells containing an isolated nucleic acid encoding an ERLK polypeptide as defined hereinabove. Preferred host cells according to the invention are plant cells. Host plants for the nucleic acids or the vector used in the method according to the invention, the expression cassette or construct or vector are, in principle, advantageously all plants, which are capable of synthesizing the polypeptides used in the inventive method.

[0217] The methods of the invention are advantageously applicable to any plant. The present invention also encompasses plants obtainable by the methods according to the present invention. The present invention therefore provides plants, plant parts or plant cells thereof obtainable by the method according to the present invention, which plants or parts or cells thereof comprise a nucleic acid transgene encoding an ERLK protein as defined above. Plants that are particularly useful in the methods of the invention include all plants which belong to the superfamily Viridiplantae, in particular monocotyledonous and dicotyledonous plants including fodder or forage legumes, ornamental plants, food crops, trees or shrubs. According to a preferred embodiment of the present invention, the plant is a crop plant. Examples of crop plants include soybean, sunflower, canola, alfalfa, rapeseed, cotton, tomato, potato and tobacco. Further preferably, the plant is a monocotyledonous plant. Examples of monocotyledonous plants include sugarcane. More preferably the plant is a cereal. Examples of cereals include rice, maize, wheat, barley, millet, rye, triticale, sorghum and oats.

[0218] The invention also extends to harvestable parts of a plant such as, but not limited to seeds, leaves, fruits, flowers, stems, roots, rhizomes, tubers and bulbs. The invention furthermore relates to products derived, preferably directly derived, from a harvestable part of such a plant, such as dry pellets or powders, oil, fat and fatty acids, starch or proteins.

[0219] According to a preferred feature of the invention, the modulated expression is increased expression. Methods for increasing expression of nucleic acids or genes, or gene products, are well documented in the art and examples are provided in the definitions section.

[0220] As mentioned above, a preferred method for modulating (preferably, increasing) expression of a nucleic acid encoding an ERLK polypeptide is by introducing and expressing in a plant a nucleic acid encoding an ERLK polypeptide; however the effects of performing the method, i.e. enhancing yield-related traits may also be achieved using other well known techniques, including but not limited to T-DNA activation tagging, TILLING, homologous recombination. A description of these techniques is provided in the definitions section.

[0221] The present invention also encompasses use of nucleic acids encoding ERLK polypeptides as described herein and use of these ERLK polypeptides in enhancing any of the aforementioned yield-related traits in plants.

[0222] Nucleic acids encoding ERLK polypeptide described herein, or the ERLK polypeptides themselves, may find use in breeding programmes in which a DNA marker is identified which may be genetically linked to an ERLK polypeptide-encoding gene. The nucleic acids/genes, or the ERLK polypeptides themselves may be used to define a molecular marker. This DNA or protein marker may then be used in breeding programmes to select plants having enhanced yield-related traits as defined hereinabove in the methods of the invention.

[0223] Allelic variants of an ERLK polypeptide-encoding nucleic acid/gene may also find use in marker-assisted breeding programmes. Such breeding programmes sometimes require introduction of allelic variation by mutagenic treatment of the plants, using for example EMS mutagenesis; alternatively, the programme may start with a collection of allelic variants of so called “natural” origin caused unintentionally. Identification of allelic variants then takes place, for example, by PCR. This is followed by a step for selection of superior allelic variants of the sequence in question and which give increased yield. Selection is typically carried out by monitoring growth performance of plants containing different allelic variants of the sequence in question. Growth performance may be monitored in a greenhouse or in the field. Further optional steps include crossing plants in which the superior allelic variant was identified with another plant. This could be used, for example, to make a combination of interesting phenotypic features.

[0224] Nucleic acids encoding ERLK polypeptides may also be used as probes for genetically and physically mapping the genes that they are a part of, and as markers for traits linked to those genes. Such information may be useful in plant breeding in order to develop lines with desired phenotypes. Such use of ERLK polypeptide-encoding nucleic acids requires only a nucleic acid sequence of at least 15 nucleotides in length. The ERLK polypeptide-encoding nucleic acids may be used as restriction fragment length polymorphism (RFLP) markers. Southern blots (Sambrook J, Fritsch E F and Maniatis T (1989) Molecular Cloning, A Laboratory Manual) of restriction-digested plant genomic DNA may be probed with the ERLK-encoding nucleic acids. The resulting banding patterns may then be subjected to genetic analyses using computer programs such as MapMaker (Lander et al. (1987) Genomics 1: 174-181) in order to construct a genetic map. In addition, the nucleic acids may be used to probe Southern blots containing restriction endonuclease-treated genomic DNAs of a set of individuals representing parent and progeny of a defined genetic cross. Segregation of the DNA polymorphisms is noted and used to calculate the position of the ERLK polypeptide-encoding nucleic acid in the genetic map previously obtained using this population (Botstein et al. (1980) Am. J. Hum. Genet. 32:314-331).

[0225] The production and use of plant gene-derived probes for use in genetic mapping is described in Bernatzky and Tanksley (1986) Plant Mol. Biol. Reporter 4: 37-41. Numerous publications describe genetic mapping of specific cDNA clones using the methodology outlined above or variations thereof. For example, F2 intercross populations, backcross populations, randomly mated populations, near isogenic lines, and other sets of individuals may be used for mapping. Such methodologies are well known to those skilled in the art.

[0226] The nucleic acid probes may also be used for physical mapping (i.e., placement of sequences on physical maps; see Hoheisel et al. In: Non-mammalian Genomic Analysis: A Practical Guide, Academic press 1996, pp. 319-346, and references cited therein).

[0227] In another embodiment, the nucleic acid probes may be used in direct fluorescence in situ hybridisation (FISH) mapping (Trask (1991) Trends Genet. 7:149-154). Although current methods of FISH mapping favour use of large clones (several kb to several hundred kb; see Laan et al. (1995) Genome Res. 5:13-20), improvements in sensitivity may allow performance of FISH mapping using shorter probes.

[0228] A variety of nucleic acid amplification-based methods for genetic and physical mapping may be carried out using the nucleic acids. Examples include allele-specific amplification (Kazazian (1989) J. Lab. Clin. Med. 11:95-96), polymorphism of PCR-amplified fragments (CAPS; Sheffield et al. (1993) Genomics 16:325-332), allele-specific ligation (Landegren et al. (1988) Science 241:1077-1080), nucleotide extension reactions (Sokolov (1990) Nucleic Acid Res. 18:3671), Radiation Hybrid Mapping (Walter et al. (1997) Nat. Genet. 7:22-28) and Happy Mapping (Dear and Cook (1989) Nucleic Acid Res. 17:6795-6807). For these methods, the sequence of a nucleic acid is used to design and produce primer pairs for use in the amplification reaction or in primer extension reactions. The design of such primers is well known to those skilled in the art. In methods employing PCR-based genetic mapping, it may be necessary to identify DNA sequence differences between the parents of the mapping cross in the region corresponding to the instant nucleic acid sequence. This, however, is generally not necessary for mapping methods.

[0229] The methods according to the present invention result in plants having enhanced yield-related traits, as described hereinbefore. These traits may also be combined with other economically advantageous traits, such as further yield-enhancing traits, tolerance to other abiotic and biotic stresses, traits modifying various architectural features and/or biochemical and/or physiological features.

### FBW40

[0230] Surprisingly, it has now been found that increasing expression in a plant of a nucleic acid encoding an FBXW polypeptide gives plants having enhanced yield-related traits relative to control plants. Therefore, the invention provides a method for enhancing yield-related in plants relative to control plants, comprising increasing expression in a plant of a nucleic acid encoding an FBXW polypeptide.

[0231] A preferred method for increasing expression of a nucleic acid encoding a FBXW polypeptide is by introducing and expressing in a plant a nucleic acid encoding a FBXW polypeptide.

[0232] Any reference hereinafter to a “protein useful in the methods of the invention” is taken to mean a FBXW polypeptide as defined herein. Any reference hereinafter to a “nucleic acid useful in the methods of the invention” is taken to mean a nucleic acid capable of encoding such a FBXW polypeptide. The nucleic acid to be introduced into a plant (and therefore useful in performing the methods of the invention) is any nucleic acid encoding the type of protein which will now be described, hereafter also named “FBXWnucleic acid” or “FBXWgene”.

[0233] The term “FBXW polypeptide” as defined herein refers to a polypeptide comprising: (i) an F-box; (ii) a WD40 domain comprising at least one WD40 repeat; (iii) Motif 1 as represented by SEQ ID NO: 97; and (iv) Motif 2 as represented by SEQ ID NO: 98. Preferably, the sequence of Motif 1 is: WK (E/K) (F/V/L) Y (C/R/G) ERWGXP, X representing any amino acid.

[0234] The most conserved amino acids within Motif 1 are XLXFGXXXYFXWKXXYXERWGXP, and within Motif 2 SLXFEXPWLVSXSXDG (where X is a specified subset of amino acids differing for each position, as presented in SEQ ID NO: 97 and SEQ ID NO: 98). Within Motif 1 and Motif 2, are allowed one or more conservative change at any position, and/or one, two or three non-conservative change(s) at any position.

[0235] Optionally, the FBXW polypeptide may comprise any one or more of the following: (a) Motif 3 as represented by SEQ ID NO: 99; (b) Motif 4 as represented by SEQ ID NO: 100; and (c) Motif 5 as represented by SEQ ID NO: 101. Within Motifs 3 to 5, are allowed one or more conservative change at any position, and/or one or two non-conservative change(s) at any position.

[0236] An example of an FBXW polypeptide as defined hereinabove comprising (i) an F-box; (ii) a WD40 domain comprising at least one WD40 repeat; (iii) Motif 1 as represented by SEQ ID NO: 97; and (iv) Motif 2 as represented by SEQ ID NO: 98; and optionally comprising any one or more of the following: (a) Motif 3 as represented by SEQ ID NO: 99; (b) Motif 4 as represented by SEQ ID NO: 100; and (c) Motif 5 as represented by SEQ ID NO: 101, is represented as in SEQ ID NO: 60 (FIG. 5 is a cartoon representing the different domains and their relative position in SEQ ID NO: 60). Further such examples are represented by any one of SEQ ID NO: 62, SEQ ID NO: 64, SEQ ID NO: 66, SEQ ID NO: 68 or SEQ ID NO: 70, or orthologues or paralogues of any of the aforementioned SEQ ID NOs. The invention is illustrated by transforming plants with the Arabidopsis thaliana sequence represented by SEQ ID NO: 59, encoding the polypeptide of SEQ ID NO: 60. SEQ ID NO: 62 (encoded by SEQ ID NO: 61, from Oryza sativa), SEQ ID NO: 64 (encoded by SEQ ID NO: 63, from Medicago trunculata), SEQ ID NO: 66 (encoded by SEQ ID NO: 65, from Triticum aestivum), SEQ ID NO: 68 (encoded by SEQ ID NO: 67, from Populus tremuloides) and SEQ ID NO: 70 (encoded by SEQ ID NO: 69, from Zea mays) are orthologues of the polypeptide of SEQ ID NO: 60.

[0237] Orthologues and paralogues (the terms being as defined above) may easily be found by performing a so-called reciprocal blast search. This may be done by a first BLAST involving BLASTing a query sequence (for example, SEQ ID NO: 59 or SEQ ID NO: 60) against any sequence database, such as the publicly available NCBI database. BLASTN or TBLASTX (using standard default values) may be used when starting from a nucleotide sequence and BLASTP or TBLASTN (using standard default values) may be used when starting from a polypeptide sequence. The BLAST results may optionally be filtered. The full-length sequences of either the filtered results or non-filtered results are then BLASTed back (second BLAST) against sequences from the organism from which the query sequence is derived (where the query sequence is SEQ ID NO: 59 or SEQ ID NO: 60, the second BLAST would therefore be against Arabidopsis sequences). The results of the first and second BLASTs are then compared. A paralogue is identified if a high-ranking hit from the first BLAST is from the same species as from which the query sequence is derived, a BLAST back then ideally results in the query sequence as highest hit (besides itself); an orthologue is identified if a high-ranking hit in the first BLAST is not from the same species as from which the query sequence is derived and preferably results upon BLAST back in the query sequence amongst the highest hits. High-ranking hits are those having a low E-value. The lower the E-value, the more significant the score (or in other words the lower the chance that the hit was found by chance). Computation of the E-value is well known in the art. In addition to E-values, comparisons are also scored by percentage identity. Percentage identity refers to the number of identical nucleotides (or amino acids) between the two compared nucleic acid (or polypeptide) sequences over a particular length. An example detailing the identification of orthologues and paralogues is given in Example 8. In the case of large families, ClustalW may be used, followed by a neighbour joining tree, to help visualize clustering of related genes and to identify orthologues and paralogues. Preferably, FBXW polypeptides useful in the methods of the invention comprise, in increasing order of preference, at least 45%, 50%, 55%, 65%, 70%, 75%, 80%, 85%, 90%, 95% or 98% sequence identity to SEQ ID NO: 60 (calculations shown in Example 9). FBXW polypeptides present relatively low amino acid sequence identity conservation between them, although their polypeptide structure (including the F-box and the WD40 domain) is well conserved. Sequence conservation between two more conserved regions of FBXW polypeptides as represented by SEQ ID NO: 102 and SEQ ID NO: 103 (both comprised within SEQ ID NO: 60) is in increasing order of preference, of at least 60%, 65%, 70%, 75%, 80%, 85%, 90%, 95% or 98% identity (calculations shwon in Example 9).

[0238] The polypeptides represented by any one of SEQ ID NO: 60, SEQ ID NO: 62, SEQ ID NO: 64,

[0239] SEQ ID NO: 66, SEQ ID NO: 68, SEQ ID NO: 70 or orthologues or paralogues of any of the aforementioned SEQ ID NOs, all comprise (i) an F-box; (ii) a WD40 domain comprising at least one WD40 repeat; (iii) Motif 1 as represented by SEQ ID NO: 97; and (iv) Motif 2 as represented by SEQ ID NO: 98.

[0240] The terms “domain” and “motif” are defined above. Special databases exisit for the identification of domains. The F-box and the WD40 repeats in a FBXW polypeptide may be identified using, for example, SMART (Schultz et al. (1998) Proc. Natl. Acad. Sci. USA 95, 5857-5864; Letunic et al. (2002) Nucleic Acids Res 30, 242-244; hosted by the EMBL at Heidelberg, Germany), InterPro (Mulder et al., (2003) Nucl. Acids. Res. 31, 315-318; hosted by the European Bioinformatics Institute (EBI) in the United Kingdom), Prosite (Bucher and Bairoch (1994), A generalized profile syntax for biomolecular sequences motifs and its function in automatic sequence interpretation. (In) ISMB-94; Proceedings 2nd International Conference on Intelligent Systems for Molecular Biology. Altman R., Brutlag D., Karp P., Lathrop R., Searls D., Eds., pp 53-61, AAAlPress, Menlo Park; Hulo et al., Nucl. Acids. Res. 32: D134-D137, (2004), The ExPASy proteomics server is provided as a service to the scientific community (hosted by the Swiss Institute of Bioinformatics (SIB) in Switzerland) or Pfam (Bateman et al., Nucleic Acids Research 30(1): 276-280 (2002), hosted by the Sanger Institute in the United Kingdom). The F-box comprises 40 to 50 residues, in which there are very few invariant positions. This lack of strict consensus makes identification using search algorithms essential. In the InterPro database, the F-box is designated by IPR001810, PF00646 in the Pfam database and PS50181 in the PROSITE database. The WD40 repeats comprised within the WD40 domain are typically of around 40 amino acids. Just as for the F-box, there are few invariant positions except that the repeat often (but not necessarily) ends with the Trp-Asp (W-D) dipeptide. Identification using search algorithms is equally essentially. In the InterPro database, the WD40 repeat is designated by IPR001680, PF00400 in the Pfam database and PS50082 in the PROSITE database. The WD40 domain typically comprise 4 to 16 repeats, preferably 5 to 10, more preferably 6 to 8, most preferably 7 repeats according to the PFAM algorithm (PF00400 repeats). The WD40 domain is designated by IPR0011046 in the InterPro database.

[0241] Methods for the alignment of sequences for comparison include GAP, BESTFIT, BLAST, FASTA and TFASTA. GAP uses the algorithm of Needleman and Wunsch ((1970) J Mol Biol 48: 443-453) to find the alignment of two complete sequences that maximizes the number of matches and minimizes the number of gaps. The BLAST algorithm (Altschul et al. (1990) J Mol Biol 215: 403-10) calculates percent sequence identity and performs a statistical analysis of the similarity between the two sequences. The software for performing BLAST analysis is publicly available through the National Centre for Biotechnology Information. Homologues may readily be identified using, for example, the ClustalW multiple sequence alignment algorithm (version 1.83) available at GenomeNet service at the Kyoto University Bioinformatics Center, with the default pairwise alignment parameters, and a scoring method in percentage. Minor manual editing may be performed to optimise alignment between conserved motifs, as would be apparent to a person skilled in the art. In some instances, default parameters may be adjusted to modify the stringency of the search. For example using BLAST, the statistical significance threshold (called “expect” value) for reporting matches against database sequences may be increased to show less stringent matches. In this way, short nearly exact matches may be identified. Motif 1 as represented by SEQ ID NO: 97 and Motif 2 as represented by SEQ ID NO: 98 both comprised in the FBXW polypeptides useful in the methods of the invention may be identified this way (FIG. 6). Within Motif 1 and Motif 2, are allowed one or more conservative change at any position, and/or one, two or three non-conservative change(s) at any position. The Motifs 3 to 5 (represented respectively by SEQ ID NO: 99, SEQ ID NO: 100 and SEQ ID NO: 101) may likewise be identified (FIG. 6). Within Motifs 3 to 5, are allowed one or more conservative change at any position, and/or one or two non-conservative change(s) at any position.

[0242] The nucleic acid encoding the polypeptides represented by any one of SEQ ID NO: 60, SEQ ID NO: 62, SEQ ID NO: 64, SEQ ID NO: 66, SEQ ID NO: 68, SEQ ID NO: 70, or orthologues or paralogues of any of the aforementioned SEQ ID NOs, need not be full-length nucleic acids, since performance of the methods of the invention does not rely on the use of full length nucleic acid sequences. Furthermore, examples of nucleic acids suitable for use in performing the methods of the invention include but are not limited to those represented by any one of: SEQ ID NO: 59, SEQ ID NO: 61, SEQ ID NO: 63, SEQ ID NO: 65, SEQ ID NO: 67 or SEQ ID NO: 69. Nucleic acid variants may also be useful in practising the methods of the invention. Examples of such variants include portions of nucleic acids, hybridising sequences, splice variants, allelic variants either naturally occurring or obtained by DNA manipulation.

[0243] A portion may be prepared, for example, by making one or more deletions to a nucleic acid encoding a FBXW polypeptide as defined hereinabove. The portions may be used in isolated form or they may be fused to other coding (or non coding) sequences in order to, for example, produce a protein that combines several activities. When fused to other coding sequences, the resultant polypeptide produced upon translation may be bigger than that predicted for the FBXW portion. Portions useful in the methods of the invention, encode an FBXW polypeptide (as described above) and having substantially the same biological activity as the FBXW polypeptide represented by any of SEQ ID NO: 60, SEQ ID NO: 62, SEQ ID NO: 64, SEQ ID NO: 66, SEQ ID NO: 68, SEQ ID NO: 70 or orthologues or paralogues of any of the aforementioned SEQ ID NOs. Examples of portions may include the nucleotides encoding a polypeptide comprising: (i) an F-box; (ii) a WD40 domain comprising at least one WD40 repeat; (iii) Motif 1 as represented by SEQ ID NO: 97; and (iv) Motif 2 as represented by SEQ ID NO: 98. Portions may optionally comprise any one or more of the following: (a) Motif 3 as represented by SEQ ID NO: 99; (b) Motif 4 as represented by SEQ ID NO: 100; and (c) Motif 5 as represented by SEQ ID NO: 101. The portion is typically at least 500 nucleotides in length, preferably at least 750 nucleotides in length, more preferably at least 1000 nucleotides in length and most preferably at least 1500 nucleotides in length. Preferably, the portion is a portion of a nucleic acid as represented by any one of SEQ ID NO: 59, SEQ ID NO: 61, SEQ ID NO: 63, SEQ ID NO: 65, SEQ ID NO: 67 or SEQ ID NO: 69. Most preferably the portion is a portion of a nucleic acid as represented by SEQ ID NO: 59.

[0244] Another nucleic acid variant useful in the methods of the invention, is a nucleic acid capable of hybridising under reduced stringency conditions, preferably under stringent conditions, with a nucleic acid encoding a FBXW polypeptide as defined hereinabove, or a with a portion as defined hereinabove.

[0245] The term “hybridisation” is defined in the Definitions section above. Hybridising sequences useful in the methods of the invention, encode a polypeptide comprising: (i) an F-box; (ii) a WD40 domain comprising at least one WD40 repeat; (iii) Motif 1 as represented by SEQ ID NO: 97; and (iv) Motif 2 as represented by SEQ ID NO: 98, and having substantially the same biological activity as the FBXW polypeptides represented by SEQ ID NO: 60, SEQ ID NO: 62, SEQ ID NO: 64, SEQ ID NO: 66, SEQ ID NO: 68, SEQ ID NO: 70, or orthologues or paralogues of any of the aforementioned SEQ ID NOs. The hybridising sequence is typically at least 250 nucleotides in length, preferably at least 500 nucleotides in length, more preferably at least 750 nucleotides in length, further preferably at least 1000 nucleotides in length, most preferably the hybridizing sequence is 1500 nucleotides in length. Preferably, the hybridising sequence is one that is capable of hybridising to any of the nucleic acids represented by SEQ ID NO: 59, SEQ ID NO: 61, SEQ ID NO: 63, SEQ ID NO: 65, SEQ ID NO: 67 or SEQ ID NO: 69 or to a portion of any of the aforementioned sequences, a portion being as defined above. Most preferably the hybridising sequence is capable of hybridising to SEQ ID NO: 59, or to portions thereof.

[0246] Portions encoding a FBXW polypeptide lacking one or more or part of: (i) an F-box; (ii) a WD40 domain comprising at least one WD40 repeat; (iii) Motif 1 as represented by SEQ ID NO: 97; and (iv) Motif 2 as represented by SEQ ID NO: 98, may be used for example, as a probe in the hybridisation process as described below, to obtain portions useful in performing the methods of the invention, comprising all of: (i) an F-box; (ii) a WD40 domain comprising at least one WD40 repeat; (iii) Motif 1 as represented by SEQ ID NO: 97; and (iv) Motif 2 as represented by SEQ ID NO: 98. Examples useful for the hybridisation process are represented by SEQ ID NO: 71 from Vitis vinifera (contig of NCBI ESTs CF210354, CF413646 and CF213082), SEQ ID NO: 73 from Senecio cambrensis (NCBI EST DY662683.1), SEQ ID NO: 75 from Helianthus annuus (NCBI EST DY916708), SEQ ID NO: 77 from Euphorbia esula (NCBI EST DV129599), SEQ ID NO: 79 from Lycopersicon esculentum (NCBI EST B1931509), SEQ ID NO: 81 from Aquilegia formosa×Aquilegia pubescens (NCBI EST DT753991.1), SEQ ID NO: 83 from Gossypium hirsutum (NCBI EST DT466-472), SEQ ID NO: 85 from Sorghum bicolor (NCBI EST CF770159), SEQ ID NO: 87 from Ipomea nil (NCBI EST BJ574759.1), SEQ ID NO: 89 from Solanum tuberosum (NCBI EST CX161187), SEQ ID NO: 91 from Zamia flscheri (NCBI EST DY032229), SEQ ID NO: 93 from Persea americana (NCBI EST CK756534) and SEQ ID NO: 95 from Glycine max (NCBI EST CD418593.1).

[0247] Another nucleic acid variant useful in the methods of the invention is a splice variant encoding a FBXW polypeptide as defined hereinabove. Preferred splice variants are splice variants of a nucleic acid encoding FBXW polypeptide represented by any of SEQ ID NO: 60, SEQ ID NO: 62, SEQ ID NO: 64, SEQ ID NO: 66, SEQ ID NO: 68, SEQ ID NO: 70, or splice variants encoding orthologues or paralogues of any of the aforementioned SEQ ID NOs. Further preferred are splice variants of nucleic acids represented by any one of SEQ ID NO: 59, SEQ ID NO: 61, SEQ ID NO: 63, SEQ ID NO: 65, SEQ ID NO: 67 or SEQ ID NO: 69. Most preferred is a splice variant of a nucleic acid as represented by SEQ ID NO: 59.

[0248] Another nucleic acid variant useful in performing the methods of the invention is an allelic variant of a nucleic acid encoding a FBXW polypeptide as defined hereinabove. Allelic variants exist in nature, and encompassed within the methods of the present invention is the use of these natural alleles. The allelic variants useful in the methods of the present invention have substantially the same biological activity as the FBXW polypeptide of SEQ ID NO: 60 and any of the amino acids depicted in Table G of Example 8. The allelic variant may be an allelic variant of a nucleic acid encoding a FBXW polypeptide represented by any of SEQ ID NO: 60, SEQ ID NO: 62, SEQ ID NO: 64, SEQ ID NO: 66, SEQ ID NO: 68, SEQ ID NO: 70, or an allelic variant of a nucleic acid encoding orthologues or paralogues of any of the aforementioned SEQ ID NOs. Further preferred are allelic variants of nucleic acids represented by any one of SEQ ID NO: 59, SEQ ID NO: 61, SEQ ID NO: 63, SEQ ID NO: 65, SEQ ID NO: 67 or SEQ ID NO: 69. Most preferred is an allelic variant of a nucleic acid as represented by SEQ ID NO: 59.

[0249] A further nucleic acid variant useful in the methods of the invention is a nucleic acid variant obtained by gene shuffling. Gene shuffling or directed evolution may also be used to generate variants of nucleic acids encoding FBXW polypeptides as defined above.

[0250] Furthermore, nucleic acid variants may also be obtained for example by site-directed mutagenesis. Several methods are available to achieve site-directed mutagenesis, the most common being PCR based methods (Current Protocols in Molecular Biology. Wiley (Eds)).

[0251] Also useful in the methods of the invention are nucleic acids encoding homologues of any one of the amino acids represented by SEQ ID NO: 60, SEQ ID NO: 62, SEQ ID NO: 64, SEQ ID NO: 66, SEQ ID NO: 68, SEQ ID NO: 70, or orthologues or paralogues of any of the aforementioned SEQ ID NOs. The terms “homologues”, “orthologues” and “paralogues” are as defined above.

[0252] Also useful in the methods of the invention are nucleic acids encoding derivatives of any one of the amino acids represented by SEQ ID NO: 60, SEQ ID NO: 62, SEQ ID NO: 64, SEQ ID NO: 66, SEQ ID NO: 68, SEQ ID NO: 70, or orthologues or paralogues of any of the aforementioned SEQ ID NOs.

[0253] Nucleic acids encoding FBXW polypeptides may be derived from any natural or artificial source. The nucleic acid may be modified from its native form in composition and/or genomic environment through deliberate human manipulation. Preferably the FBXW polypeptide-encoding nucleic acid is from a plant, further preferably from a dicotyledonous plant, more preferably from the Brassicaceae family, most preferably the nucleic acid is from Arabidopsis thaliana.

[0254] The invention also provides genetic constructs and vectors to facilitate introduction and/or expression of the nucleic acid sequences useful in the methods according to the invention, in a plant.

[0255] Therefore, there is provided a gene construct comprising:
[0256] (i) A nucleic acid encoding a FBXW polypeptide as defined hereinabove;
[0257] (ii) One or more control sequences operably liked to the nucleic acid of (i).

[0258] Constructs useful in the methods according to the present invention may be constructed using recombinant DNA technology well known to persons skilled in the art. The gene constructs may be inserted into vectors, which may be commercially available, suitable for transforming into plants and suitable for expression of the gene of interest in the transformed cells. The invention therefore provides use of a gene construct as defined hereinabove in the methods of the invention.

[0259] Plants are transformed with a vector comprising the sequence of interest (i.e., a nucleic acid encoding a FBXW polypeptide). The skilled artisan is well aware of the genetic elements that must be present on the vector in order to successfully transform, select and propagate host cells containing the sequence of interest. The sequence of interest is operably linked to one or more control sequences (at least to a promoter).

[0260] Advantageously, any type of promoter, whether natural or synthetic, may be used to drive expression of the nucleic acid sequence.

[0261] According to a preferred aspect of the invention, the nucleic acid encoding a FBXW polypeptide is operably linked to a constitutive promoter (a control sequence). The constitutive promoter is preferably a GOS2 (also named SUl1 or elF1 (eukaryotic initiation factor 1) promoter, more preferably the constitutive promoter is a rice GOS2 promoter, further preferably the constitutive promoter is represented by a nucleic acid sequence substantially similar to SEQ ID NO: 104 or SEQ ID NO: 58, most preferably the constitutive promoter is as represented by SEQ ID NO: 104 or SEQ ID NO: 58.

[0262] It should be clear that the applicability of the present invention is not restricted to the nucleic acid encoding an FBXW polypeptide as represented by SEQ ID NO: 59, nor is the applicability of the invention restricted to expression of a such nucleic acid encoding an FBXW polypeptide when driven by a GOS2 promoter.

[0263] Additional regulatory elements for increasing expression of nucleic acids or genes, or gene products, may include transcriptional as well as translational enhancers. Those skilled in the art will be aware of terminator and enhancer sequences that may be suitable for use in performing the invention. An example of such regulatory element is an intron introduced in the 5′ untranslated region. Optionally, one or more terminator sequences (also a control sequence) may be used in the construct introduced into a plant.

[0264] Other control sequences (besides promoter, enhancer, silencer, intron sequences, 3′UTR and/or 5′UTR regions) may be protein and/or RNA stabilizing elements. Such sequences would be known or may readily be obtained by a person skilled in the art.

[0265] The genetic constructs of the invention may further include an origin of replication sequence that is required for maintenance and/or replication in a specific cell type. One example is when a genetic construct is required to be maintained in a bacterial cell as an episomal genetic element (e.g. plasmid or cosmid molecule). Preferred origins of replication include, but are not limited to, the f1-ori and colE1.

[0266] For the detection of the successful transfer of the nucleic acid sequences as used in the methods of the invention and/or selection of transgenic plants comprising these nucleic acids, it is advantageous to use marker genes (or reporter genes). Therefore genetic construct may optionally comprise a selectable marker gene. The marker genes may be removed or excised from the transgenic cell once they are no longer needed. Techniques for marker removal are known in the art, useful techniques are described above in the definitions section.

[0267] The invention also provides a method for the production of transgenic plants having increased yield relative to suitable control plants, comprising introduction and expression in a plant of a nucleic acid encoding a FBXW polypeptide as defined hereinabove.

[0268] More specifically, the present invention provides a method for the production of transgenic plants having increased yield relative to suitable control plants, which method comprises:
[0269] (i) introducing and expressing a nucleic acid encoding a FBXW polypeptide in a plant cell; and
[0270] (ii) cultivating the plant cell under conditions promoting plant growth and development.

[0271] The nucleic acid may be introduced directly into a plant cell or into the plant itself (including introduction into a tissue, organ or any other part of a plant). According to a preferred feature of the present invention, the nucleic acid is preferably introduced into a plant by transformation. The term “transformation” as referred to herein is defined above.

[0272] Generally after transformation, plant cells or cell groupings are selected for the presence of one or more markers which are encoded by plant-expressible genes co-transferred with the gene of interest, following which the transformed material is regenerated into a whole plant. The genetically modified plant cells can be regenerated via all methods with which the skilled worker is familiar. Suitable methods can be found in the abovementioned publications by S. D. Kung and R. Wu, Potrykus or Höfgen and Willmitzer. To select transformed plants, the plant material obtained in the transformation is, as a rule, subjected to selective conditions so that transformed plants can be distinguished from untransformed plants. For example, the seeds obtained in the above-described manner can be planted and, after an initial growing period, subjected to a suitable selection by spraying. A further possibility consists in growing the seeds, if appropriate after sterilization, on agar plates using a suitable selection agent so that only the transformed seeds can grow into plants. Alternatively, the transformed plants are screened for the presence of a selectable marker such as the ones described above.

[0273] Following DNA transfer and regeneration, putatively transformed plants may be evaluated, for instance using Southern analysis, for the presence of the gene of interest, copy number and/or genomic organisation. Alternatively or additionally, expression levels of the newly introduced DNA may be monitored using Northern and/or Western analysis, or quantitative PCR, all techniques being well known to persons having ordinary skill in the art.

[0274] The generated transformed plants may be propagated by a variety of means, such as by clonal propagation or classical breeding techniques. For example, a first generation (or T1) transformed plant may be self-pollinated to give homozygous second generation (or T2) transformants, and the T2 plants further propagated through classical breeding techniques.

[0275] The generated transformed organisms may take a variety of forms. For example, they may be chimeras of transformed cells and non-transformed cells; clonal transformants (e.g., all cells transformed to contain the expression cassette); grafts of transformed and untransformed tissues (e.g., in plants, a transformed rootstock grafted to an untransformed scion).

[0276] The present invention clearly extends to any plant cell or plant produced by any of the methods described herein, and to all plant parts and propagules thereof. The present invention extends further to encompass the progeny of a primary transformed or transfected cell, tissue, organ or whole plant that has been produced by any of the aforementioned methods, the only requirement being that progeny exhibit the same genotypic and/or phenotypic characteristic(s) as those produced by the parent in the methods according to the invention.

[0277] The invention also includes host cells containing an isolated nucleic acid encoding a FBXW polypeptide as defined hereinabove. Preferred host cells according to the invention are plant cells. Host plants for the nucleic acids or the vector used in the method according to the invention, the expression cassette or construct or vector are, in principle, advantageously all plants, which are capable of synthesizing the polypeptides used in the inventive method.

[0278] The invention also extends to harvestable parts of a plant such as, but not limited to seeds, leaves, fruits, flowers, stems, roots, rhizomes, tubers and bulbs. The invention furthermore relates to products derived, preferably directly derived, from a harvestable part of such a plant, such as dry pellets or powders, oil, fat and fatty acids, starch or proteins.

[0279] According to a preferred feature of the invention, the modulated expression is increased expression. Methods for increasing expression of nucleic acids or genes, or gene products, are well documented in the art and examples are provided in the definitions section.

[0280] As mentioned above, a preferred method for modulating (preferably, increasing) expression of a nucleic acid encoding a FBXW polypeptide is by introducing and expressing in a plant a nucleic acid encoding a FBXW polypeptide; however the effects of performing the method, i.e. enhancing yield-related traits may also be achieved using other well known techniques, including but not limited to T-DNA activation tagging, TILLING, homologous recombination. A description of these techniques is provided in the definitions section.

[0281] Performance of the methods of the invention gives plants having enhanced yield-related traits. In particular performance of the methods of the invention gives plants having increased yield, especially increased seed yield relative to control plants. The terms “yield” and “seed yield” are described in more detail in the “definitions” section herein.

[0282] Reference herein to enhanced yield-related traits is taken to mean an increase in biomass (weight) of one or more parts of a plant, which may include aboveground (harvestable) parts and/or (harvestable) parts below ground. In particular, such harvestable parts are seeds, and performance of the methods of the invention results in plants having increased seed yield relative to the seed yield of control plants.

[0283] Taking corn as an example, a yield increase may be manifested as one or more of the following: increase in the number of plants per hectare or acre, an increase in the number of ears per plant, an increase in the number of rows, number of kernels per row, kernel weight, thousand kernel weight, ear length/diameter, increase in the seed filling rate (which is the number of filled seeds divided by the total number of seeds and multiplied by 100), among others. Taking rice as an example, a yield increase may manifest itself as an increase in one or more of the following: number of plants per hectare or acre, number of panicles per plant, number of spikelets per panicle, number of flowers (florets) per panicle (which is expressed as a ratio of the number of filled seeds over the number of primary panicles), increase in the seed filling rate (which is the number of filled seeds divided by the total number of seeds and multiplied by 100), increase in thousand kernel weight, among others.

[0284] Since the transgenic plants according to the present invention have increased yield, it is likely that these plants exhibit an increased growth rate (during at least part of their life cycle), relative to the growth rate of control plants at a corresponding stage in their life cycle.

[0285] The increased growth rate may be specific to one or more parts of a plant (including seeds), or may be throughout substantially the whole plant. Plants having an increased growth rate may have a shorter life cycle. The life cycle of a plant may be taken to mean the time needed to grow from a dry mature seed up to the stage where the plant has produced dry mature seeds, similar to the starting material. This life cycle may be influenced by factors such as early vigour, growth rate, greenness index, flowering time and speed of seed maturation. The increase in growth rate may take place at one or more stages in the life cycle of a plant or during substantially the whole plant life cycle. Increased growth rate during the early stages in the life cycle of a plant may reflect enhanced vigour. The increase in growth rate may alter the harvest cycle of a plant allowing plants to be sown later and/or harvested sooner than would otherwise be possible (a similar effect may be obtained with earlier flowering time). If the growth rate is sufficiently increased, it may allow for the further sowing of seeds of the same plant species (for example sowing and harvesting of rice plants followed by sowing and harvesting of further rice plants all within one conventional growing period). Similarly, if the growth rate is sufficiently increased, it may allow for the further sowing of seeds of different plants species (for example the sowing and harvesting of corn plants followed by, for example, the sowing and optional harvesting of soybean, potato or any other suitable plant). Harvesting additional times from the same rootstock in the case of some crop plants may also be possible. Altering the harvest cycle of a plant may lead to an increase in annual biomass production per acre (due to an increase in the number of times (say in a year) that any particular plant may be grown and harvested). An increase in growth rate may also allow for the cultivation of transgenic plants in a wider geographical area than their wild-type counterparts, since the territorial limitations for growing a crop are often determined by adverse environmental conditions either at the time of planting (early season) or at the time of harvesting (late season). Such adverse conditions may be avoided if the harvest cycle is shortened. The growth rate may be determined by deriving various parameters from growth curves, such parameters may be: T-Mid (the time taken for plants to reach 50% of their maximal size) and T-90 (time taken for plants to reach 90% of their maximal size), amongst others.

[0286] According to a preferred feature of the present invention, performance of the methods of the invention gives plants having an increased growth rate relative to control plants. Therefore, according to the present invention, there is provided a method for increasing the growth rate of plants, which method comprises modulating expression, preferably increasing expression, in a plant of a nucleic acid encoding a FBXW polypeptide as defined herein.

[0287] An increase in yield and/or growth rate occurs whether the plant is under non-stress conditions or whether the plant is exposed to various stresses compared to control plants. Plants typically respond to exposure to stress by growing more slowly. In conditions of severe stress, the plant may even stop growing altogether. Mild stress on the other hand is defined herein as being any stress to which a plant is exposed which does not result in the plant ceasing to grow altogether without the capacity to resume growth. Mild stress in the sense of the invention leads to a reduction in the growth of the stressed plants of less than 40%, 35% or 30%, preferably less than 25%, 20% or 15%, more preferably less than 14%, 13%, 12%, 11% or 10% or less in comparison to the control plant under non-stress conditions. Due to advances in agricultural practices (irrigation, fertilization, pesticide treatments) severe stresses are not often encountered in cultivated crop plants. As a consequence, the compromised growth induced by mild stress is often an undesirable feature for agriculture. Mild stresses are the everyday biotic and/or abiotic (environmental) stresses to which a plant is exposed. Abiotic stresses may be due to drought or excess water, anaerobic stress, salt stress, chemical toxicity, oxidative stress and hot, cold or freezing temperatures. The abiotic stress may be an osmotic stress caused by a water stress (particularly due to drought), salt stress, oxidative stress or an ionic stress. Biotic stresses are typically those stresses caused by pathogens, such as bacteria, viruses, fungi and insects.

[0288] In particular, the methods of the present invention may be performed under non-stress conditions or under conditions of mild drought to give plants having increased yield relative to control plants. As reported in Wang et al. (Planta (2003) 218: 1-14), abiotic stress leads to a series of morphological, physiological, biochemical and molecular changes that adversely affect plant growth and productivity. Drought, salinity, extreme temperatures and oxidative stress are known to be interconnected and may induce growth and cellular damage through similar mechanisms. Rabbani et al. (Plant Physiol (2003) 133: 1755-1767) describes a particularly high degree of “cross talk” between drought stress and high-salinity stress. For example, drought and/or salinisation are manifested primarily as osmotic stress, resulting in the disruption of homeostasis and ion distribution in the cell. Oxidative stress, which frequently accompanies high or low temperature, salinity or drought stress, may cause denaturing of functional and structural proteins. As a consequence, these diverse environmental stresses often activate similar cell signalling pathways and cellular responses, such as the production of stress proteins, up-regulation of anti-oxidants, accumulation of compatible solutes and growth arrest. The term “non-stress” conditions as used herein are those environmental conditions that allow optimal growth of plants. Persons skilled in the art are aware of normal soil conditions and climatic conditions for a given location.

[0289] Performance of the methods of the invention gives plants grown under non-stress conditions or under mild drought conditions increased yield relative to control plants grown under comparable conditions. Therefore, according to the present invention, there is provided a method for increasing yield in plants grown under non-stress conditions or under mild drought conditions, which method comprises increasing expression in a plant of a nucleic acid encoding a FBXW polypeptide.

[0290] Performance of the methods of the invention gives plants grown under conditions of nutrient deficiency, particularly under conditions of nitrogen deficiency, increased yield relative to control plants grown under comparable conditions. Therefore, according to the present invention, there is provided a method for increasing yield in plants grown under conditions of nutrient deficiency, which method comprises increasing expression in a plant of a nucleic acid encoding a FBXW polypeptide. Nutrient deficiency may result from a lack of nutrients such as nitrogen, phosphates and other phosphorous-containing compounds, potassium, calcium, cadmium, magnesium, manganese, iron and boron, amongst others.

[0291] The methods of the invention are advantageously applicable to any plant. Plants that are particularly useful in the methods of the invention include all plants which belong to the superfamily Viridiplantae, in particular monocotyledonous and dicotyledonous plants including fodder or forage legumes, ornamental plants, food crops, trees or shrubs. According to a preferred embodiment of the present invention, the plant is a crop plant. Examples of crop plants include soybean, sunflower, canola, alfalfa, rapeseed, cotton, tomato, potato and tobacco. Further preferably, the plant is a monocotyledonous plant. Examples of monocotyledonous plants include sugarcane. More preferably the plant is a cereal. Examples of cereals include rice, maize, wheat, barley, millet, rye, triticale, sorghum and oats.

[0292] The present invention also encompasses plants obtainable by the methods according to the present invention. The present invention therefore provides plants, parts and cells from such plants obtainable by the methods according to the present invention, which plants or parts or cells comprise a nucleic acid transgene encoding a FBXW polypeptide as defined above.

[0293] The present invention also encompasses use of nucleic acids encoding FBXW polypeptides in increasing yield in a plant compared to yield in a suitable control plant.

[0294] One such use relates to increasing yield of plants, yield being defined as defined herein above. Yield may in particular include one or more of the following: increased seed yield, increased number of (filled) seeds, increased thousand kernel weight (TKW), increased harvest index and increased seed fill rate.

[0295] Nucleic acids encoding FBXW polypeptides may find use in breeding programmes in which a DNA marker is identified which may be genetically linked to a gene encoding FBXW polypeptide. Nucleic acids encoding FBXW polypeptides may be used to define a molecular marker. This marker may then be used in breeding programmes to select plants having increased seed yield. The nucleic acids encoding FBXW polypeptides may be, for example, a nucleic acid as represented by any one of SEQ ID NO: 59, SEQ ID NO: 61, SEQ ID NO: 63, SEQ ID NO: 65, SEQ ID NO: 67 or SEQ ID NO: 69.

[0296] Allelic variants of a nucleic acid encoding an FBXW polypeptide may also find use in marker-assisted breeding programmes. Such breeding programmes sometimes require introduction of allelic variation by mutagenic treatment of the plants, using for example EMS mutagenesis; alternatively, the programme may start with a collection of allelic variants of so called “natural” origin caused unintentionally. Identification of allelic variants then takes place, for example, by PCR. This is followed by a step for selection of superior allelic variants of the sequence in question and which give increased seed yield. Selection is typically carried out by monitoring growth performance of plants containing different allelic variants of the sequence in question, for example, different allelic variants of any one of SEQ ID NO: 59, SEQ ID NO: 61, SEQ ID NO: 63, SEQ ID NO: 65, SEQ ID NO: 67 or SEQ ID NO: 69. Growth performance may be monitored in a greenhouse or in the field. Further optional steps include crossing plants, in which the superior allelic variant was identified, with another plant. This could be used, for example, to make a combination of interesting phenotypic features.

[0297] Nucleic acids encoding FBXW polypeptides may also be used as probes for genetically and physically mapping the genes that they are a part of, and as markers for traits linked to those genes. Such information may be useful in plant breeding in order to develop lines with desired phenotypes. Such use of nucleic acids encoding FBXW polypeptides requires only a nucleic acid sequence of at least 15 nucleotides in length. The nucleic acids encoding FBXW polypeptides may be used as restriction fragment length polymorphism (RFLP) markers. Southern blots (Sambrook J, Fritsch E F and Maniatis T (1989) Molecular Cloning, A Laboratory Manual) of restriction-digested plant genomic DNA may be probed with a nucleic acid encoding FBXW polypeptide. The resulting banding patterns may then be subjected to genetic analyses using computer programs such as MapMaker (Lander et al. (1987) Genomics 1: 174-181) in order to construct a genetic map. In addition, the nucleic acid may be used to probe Southern blots containing restriction endonuclease-treated genomic DNAs of a set of individuals representing parent and progeny of a defined genetic cross. Segregation of the DNA polymorphisms is noted and used to calculate the position of the nucleic acid encoding FBXW polypeptide in the genetic map previously obtained using this population (Botstein et al. (1980) Am. J. Hum. Genet. 32: 314-331).

[0298] The production and use of plant gene-derived probes for use in genetic mapping is described in Bernatzky and Tanksley (GENETICS112 (4): 887-898, 1986). Numerous publications describe genetic mapping of specific cDNA clones using the methodology outlined above or variations thereof. For example, F2 intercross populations, backcross populations, randomly mated populations, near isogenic lines (NIL), and other sets of individuals may be used for mapping. Such methodologies are well known to those skilled in the art.

[0299] The nucleic acid probes may also be used for physical mapping (i.e., placement of sequences on physical maps; see Hoheisel et al. In: Non-mammalian Genomic Analysis: A Practical Guide, Academic press 1996, pp. 319-346, and references cited therein).

[0300] In another embodiment, the nucleic acid probes may be used in direct fluorescence in situ hybridization (FISH) mapping (Trask (1991) Trends Genet. 7:149-154). Although current methods of FISH mapping favour use of large clones (several kb to several hundred kb; see Laan et al. (1995) Genome Res. 5:13-20), improvements in sensitivity may allow performance of FISH mapping using shorter probes.

[0301] A variety of nucleic acid amplification-based methods for genetic and physical mapping may be carried out using the nucleic acids. Examples include allele-specific amplification (Kazazian (1989) J. Lab. Clin. Med. 11:95-96), polymorphism of PCR-amplified fragments (CAPS; Sheffield et al. (1993) Genomics 16:325-332), allele-specific ligation (Landegren et al. (1988) Science 241:1077-1080), nucleotide extension reactions (Sokolov (1990) Nucleic Acid Res. 18:3671), Radiation Hybrid Mapping (Walter et al. (1997) Nat. Genet. 7:22-28) and Happy Mapping (Dear and Cook (1989) Nucleic Acid Res. 17:6795-6807). For these methods, the sequence of a nucleic acid is used to design and produce primer pairs for use in the amplification reaction or in primer extension reactions. The design of such primers is well known to those skilled in the art. In methods employing PCR-based genetic mapping, it may be necessary to identify DNA sequence differences between the parents of the mapping cross in the region corresponding to the instant nucleic acid sequence. This, however, is generally not necessary for mapping methods.

[0302] The methods according to the present invention result in plants having increased yield, as described hereinbefore. These traits may also be combined with other economically advantageous traits, such as further yield-increasing traits, tolerance to other abiotic and biotic stresses, traits modifying various architectural features and/or biochemical and/or physiological features.

### RANBP

[0303] Upon investigating the use of RAN-binding proteins to enhance yield-related traits, the inventors named in this application found the choice of promoter to be an important consideration. They found that expressing RAN-binding proteins in a (rice) plant under the control of a constitute promoter did not have any effect on yield-related phenotypes. They surprisingly found that plant yield could successfully be increased by expressing RAN-binding proteins in a plant under the control of a seed-specific promoter, particularly an endosperm-specific promoter.

[0304] The present invention therefore provides a method for enhancing yield-related traits in plants relative to control plants, comprising preferentially modulating expression in plant seed or seed parts of a nucleic acid encoding a RANBP.

[0305] A preferred method for modulating (preferably, increasing) expression in plant seed or seed parts of a nucleic acid encoding a RANBP is by introducing and expressing in a plant a nucleic acid encoding a RANBP under the control of a seed-specific promoter.

[0306] Any reference hereinafter to a “protein useful in the methods of the invention” is taken to mean a RANBP polypeptide as defined herein. Any reference hereinafter to a “nucleic acid useful in the methods of the invention” is taken to mean a nucleic acid capable of encoding such a RANBP polypeptide. The nucleic acid to be introduced into a plant (and therefore useful in performing the methods of the invention) is any nucleic acid encoding the type of protein which will now be described, hereafter also named “RANBP nucleic acid” or “RANBP gene”.

[0307] Nucleic acids suitable for introducing into a plant (and therefore useful in performing the methods of the invention) include any nucleic acid encoding a RANBP having motif I: KSC V/L WHAXDF A/S DGELK D/E EXF, where ‘X’ is any amino acid, allowing zero or one conservative change at any position and/or zero one, two or three non-conservative change(s) at any position.

[0308] In the case of RANBPs from monocotyledonous plants, the C-terminus of Motif I often ends in ‘AIRFG’, and in the case of RANBPs from dicotyledonous plants, the C-terminus of Motif I often ends in ‘CIRFA’.

[0309] RANBP-encoding nucleic acids useful in the methods of the invention may also comprise (in addition to Motif I) any one or more of the following motifs.
[0310] 1. Motif II as represented by SEQ ID NO: 139 or 145 or a motif having in increasing order of preference at least 60%, 70%, 80%, 90% or more percentage sequence identity to
[0311] Motif II represented by SEQ ID NO: 139 or 145; 2. Motif III as represented by represented by SEQ ID NO: 140 or 146 or a motif having in increasing order of preference at least 70%, 80%, 90% or more percentage sequence identity to Motif III as represented by SEQ ID NO: 140 or 146;
[0312] 3. Motif IV as represented by SEQ ID NO: 141 or 147 allowing for zero or one conservative change at any position and/or zero or one non-conservative change at any position;
[0313] 4. Motif V as represented by SEQ ID NO: 142 or 148 or a motif having in increasing order of preference at least 70%, 80%, 90% or more percentage sequence identity to Motif V as represented by SEQ ID NO: 142 or 148;
[0314] 5. Motif VI as represented by SEQ ID NO: 143 or 149 allowing for zero or one conservative change at any position and/or zero or one non-conservative change at any position;
[0315] 6. Motif VII as represented by SEQ ID NO: 144 or 150 or a motif having in increasing order of preference at least 60%, 70%, 80%, 90% or more percentage sequence identity to Motif VII represented by SEQ ID NO: 144 or 150.

[0316] The aforementioned motifs represent amino acids conserved at specific positions along an alignment of sequences of evolutionarily related proteins. Whilst amino acids at other positions may vary between homologues, amino acids that are highly conserved at specific positions indicate amino acids that are likely essential to the structure, stability or activity of the protein. Identified by their high degree of conservation in aligned sequences of a family of protein homologues, they can be used as identifiers to determine if any polypeptide in question belongs to a previously identified polypeptide family (in this case, the family of RNABPs).

[0317] The various motifs mentioned above may readily be identified using methods for the alignment of sequences for comparison. In some instances, default parameters may be adjusted to modify the stringency of the search. For example using BLAST, the statistical significance threshold (called E-value) for reporting matches against database sequences may be increased to show less stringent matches. In this way, short nearly exact matches may be identified.

[0318] Methods for the alignment of sequences for comparison are well known in the art, such methods include GAP, BESTFIT, BLAST, FASTA and TFASTA. GAP uses the algorithm of Needleman and Wunsch ((1970) J Mol Biol 48: 443-453) to find the global (over the whole the sequence) alignment of two sequences that maximizes the number of matches and minimizes the number of gaps. The BLAST algorithm (Altschul et al. (1990) J Mol Biol 215: 403-10) calculates percent sequence identity and performs a statistical analysis of the similarity between the two sequences. The software for performing BLAST analysis is publicly available through the National Centre for Biotechnology Information (NCBI). Homologues may readily be identified using, for example, the ClustalW multiple sequence alignment algorithm (version 1.83), with the default pairwise alignment parameters, and a scoring method in percentage. Homologues may readily be identified using, for example, the ClustalW multiple sequence alignment algorithm (version 1.83), with the default pairwise alignment parameters, and a scoring method in percentage. Global percentages of similarity and identity may also be determined using one of the methods available in the MatGAT software package (Campanella et al., BMC Bioinformatics. 2003 Jul. 10; 4:29. MatGAT: an application that generates similarity/identity matrices using protein or DNA sequences.). Minor manual editing may be performed to optimise alignment between conserved motifs, as would be apparent to a person skilled in the art. Furthermore, instead of using full-length sequences for the identification of homologues, specific domains may also be used. The sequence identity values may be determined over the entire nucleic acid or amino acid sequence or over selected domains or conserved motif(s), using the programs mentioned above using the default parameters.

[0319] All RanBP1 proteins contain an approximately 150 amino acid residue Ran binding domain. Specialist databases exist for the identification of domains. Domains in RANBPs may be identified using, for example, SMART (Schultz et al. (1998) Proc. Natl. Acad. Sci. USA 95, 5857-5864; Letunic et al. (2002) Nucleic Acids Res 30, 242-244), InterPro (Mulder et al., (2003) Nucl. Acids. Res. 31, 315-318), Prosite (Bucher and Bairoch (1994), A generalized profile syntax for biomolecular sequences motifs and its function in automatic sequence interpretation. (In) ISMB-94; Proceedings 2nd International Conference on Intelligent Systems for Molecular Biology. Altman R., Brutlag D., Karp P., Lathrop R., Searls D., Eds., pp 53-61, AAAIPress, Menlo Park; Hulo et al., Nucl. Acids. Res. 32:D134-D137, (2004),) or Pfam (Bateman et al., Nucleic Acids Research 30(1): 276-280 (2002). A set of tools for in silico analysis of protein sequences is available on the ExPASy proteomics server (Swiss Institute of Bioinformatics (Gasteiger et al., ExPASy: the proteomics server for in-depth protein knowledge and analysis, Nucleic Acids Res. 31:3784-3788 (2003)). Domains or motifs may also be identified using routine techniques, such as by sequence alignment.

[0320] The invention is illustrated (see the Examples section) by transforming plants with a RANBP from Zea mays as represented by SEQ ID NO: 113, encoding the polypeptide of SEQ ID NO: 114 or SEQ ID NO: 115. The invention is also illustrated by transforming plants with a RANBP from Arabidopsis thaliana as represented by SEQ ID NO: 116, encoding the polypeptide of SEQ ID NO: 117 or SEQ ID NO: 118.

[0321] Of course performance of the methods of the invention is not restricted to the use of the aforementioned sequences, but may be performed using any nucleic acid encoding a RANBP comprising Motif I, as defined hereinabove. Examples of such nucleic acids encoding RANBPs comprising Motif I include nucleic acids encoding homologues, orthologues and paralogues of SEQ ID NO: 114, SEQ ID NO: 115, SEQ ID NO: 117 and SEQ ID NO: 118; the terms homologues, orthologues and paralogues being as defined above. Examples of such homologues, orthologues and paralogues include the sequences listed in Table P of Example 14.

[0322] Orthologues and paralogues may easily be found by performing a so-called reciprocal blast search. Typically this involves a first BLAST involving BLASTing a query sequence (for example, SEQ ID NO: 113, SEQ ID NO: 114, SEQ ID NO: 115, SEQ ID NO: 116, SEQ ID NO: 117 or SEQ ID NO: 118) against any sequence database, such as the publicly available NCBI database. BLASTN or TBLASTX (using standard default values) is generally used when starting from a nucleotide sequence, and BLASTP or TBLASTN (using standard default values) when starting from a protein sequence. The BLAST results may optionally be filtered. The full-length sequences of either the filtered results or non-filtered results are then BLASTed back (second BLAST) against sequences from the organism from which the query sequence is derived (where the query sequence is SEQ ID NO: 113, SEQ ID NO: 114 or SEQ ID NO: 115, the second BLAST would be against Zea mays sequences; where the query sequence is SEQ ID NO: 116, SEQ ID NO: 117 or SEQ ID NO: 118, the second BLAST would be against Arabidopsis thaliana sequences). The results of the first and second BLASTs are then compared. A paralogue is identified if a high-ranking hit from the first blast is from the same species as from which the query sequence is derived, a BLAST back then ideally results in the query sequence as highest hit; an orthologue is identified if a high-ranking hit in the first BLAST is not from the same species as from which the query sequence is derived, and preferably results upon BLAST back in the query sequence being among the highest hits.

[0323] High-ranking hits are those having a low E-value. The lower the E-value, the more significant the score (or in other words the lower the chance that the hit was found by chance). Computation of the E-value is well known in the art. In addition to E-values, comparisons are also scored by percentage identity. Percentage identity refers to the number of identical nucleotides (or amino acids) between the two compared nucleic acid (or polypeptide) sequences over a particular length. In the case of large families, ClustalW may be used, followed by a neighbour joining tree, to help visualize clustering of related genes and to identify orthologues and paralogues.

[0324] Nucleic acid variants may also be useful in practising the methods of the invention. Examples of such variants include nucleic acids encoding homologues and derivatives of any one of the amino acid sequences given in Table P of Example 14, the terms “homologue” and “derivative” being as defined herein. Also useful in the methods of the invention are nucleic acids encoding homologues and derivatives of orthologues or paralogues of any one of the amino acid sequences given in Table P of Example 14. Homologues and derivatives useful in the methods of the present invention have substantially the same biological and functional activity as the unmodified protein from which they are derived.

[0325] Typically, nucleic acids encoding RANBPs comprising at least Motif I have, in increasing order of preference, at least 50%, 55%, 60%, 65%, 70%, 75%, 80%, 85%, 90%, 95% or more sequence identity to the nucleic acid sequence represented by SEQ ID NO: 113 or SEQ ID NO: 116.

[0326] Also useful in the methods of the invention are nucleic acids encoding derivatives of the amino acids represented by SEQ ID NO 114, SEQ ID NO: 115, SEQ ID NO: 117 or SEQ ID NO 118 or nucleic acids encoding derivatives of the orthologues or paralogues of SEQ ID NO 114, SEQ ID NO: 115, SEQ ID NO: 117 or SEQ ID NO 118.

[0327] Nucleic acids encoding the polypeptides represented by the sequences in Table P, or nucleic acids encoding orthologues or paralogues of any of these SEQ ID NOs, need not be full-length nucleic acids, since performance of the methods of the invention does not rely on the use of full length nucleic acid sequences. Examples of nucleic acids suitable for use in performing the methods of the invention include, but are not limited to those represented in Table P of Example 14. Nucleic acid variants may also be useful in practising the methods of the invention. Examples of such nucleic acid variants include portions of nucleic acids encoding a RANBP, splice variants of nucleic acids encoding a RANBP, sequences hybridising to nucleic acids encoding a RANBP, allelic variants of nucleic acids encoding a RANBP and variants of nucleic acids encoding a RANBP designed by gene shuffling. The terms splice variant and allelic variant are described above.

[0328] A portion of a nucleic acid encoding a RANBP may be prepared, for example, by making one or more deletions to the nucleic acid. The portions may be used in isolated form or they may be fused to other coding (or non-coding) sequences in order to, for example, produce a protein that combines several activities. When fused to other coding sequences, the resultant polypeptide produced upon translation may be bigger than that predicted for the RANBP portion.

[0329] Portions useful in the methods of the invention, encode a polypeptide comprising Motif I as described above and having substantially the same biological activity as the RANBP represented by the sequences listed in Table P, or orthologues or paralogues of any of the aforementioned SEQ ID NOs. The portion is typically at least 200 consecutive nucleotides in length, preferably at least 300 consecutive nucleotides in length, more preferably at least 400 consecutive nucleotides in length. Preferably, the portion is a portion of a nucleic acid as represented by any one of the sequences listed in Table P. Most preferably the portion is a portion of a nucleic acid as represented by SEQ ID NO: 113 or SEQ ID NO: 116.

[0330] According to the present invention, there is provided a method for enhancing yield-related traits in plants, comprising introducing and preferentially expressing in plant seed or seed parts a portion of a nucleic acid represented by any of the sequences listed in Table P.

[0331] Another nucleic acid variant useful in the methods of the invention, is a nucleic acid capable of hybridising under reduced stringency conditions, preferably under stringent conditions, with a nucleic acid encoding a RANBP as defined herein, or a with a portion as defined herein.

[0332] Hybridising sequences useful in the methods of the invention, encode a polypeptide comprising Motif I and having substantially the same biological activity as the RANBP represented by any of the sequences listed in Table P, or having substantially the same biological activity as orthologues or paralogues of any of the aforementioned SEQ ID NOs. The hybridising sequence is typically at least 200 consecutive nucleotides in length, preferably at least 300 consecutive nucleotides in length, more preferably at least 400 consecutive nucleotides in length. Preferably, the hybridising sequence is one that is capable of hybridising to any of the nucleic acids represented by the sequences listed in Table P, or to a portion of any of the aforementioned sequences, a portion being as defined above. Most preferably the hybridising sequence is capable of hybridising to a nucleic acid as represented by SEQ ID NO: 113 or 116, or to portions thereof.

[0333] According to the present invention, there is provided a method for enhancing yield-related traits in plants, comprising introducing and preferentially expressing in plant seed or seed parts a nucleic acid capable of hybridizing to a nucleic acid encoding a RANBP represented by any of the sequences listed in Table P, or comprising introducing and preferentially expressing in plant seed or seed parts a nucleic acid capable of hybridising to a nucleic acid encoding an orthologue, paralogue or homologue of any of the aforementioned SEQ ID NOs.

[0334] Another nucleic acid variant useful in the methods of the invention is a splice variant encoding a RANBP as defined hereinabove. According to the present invention, there is provided a method for enhancing yield-related traits in plants, comprising introducing and preferentially expressing in plant seed or seed parts a splice variant of a nucleic acid encoding a RANBP represented by any of the sequences listed in Table P, or a splice variant of a nucleic acid encoding an orthologue, paralogue or homologue of any of the aforementioned SEQ ID NOs.

[0335] Preferred splice variants are splice variants of a nucleic acid encoding a RANBP represented by any of SEQ ID NO: 114, SEQ ID NO 115, SEQ ID NO: 117 or SEQ ID NO: 118. Further preferred are splice variants of nucleic acids represented by any one of the sequences listed in Table P. Most preferred is a splice variant of a nucleic acid as represented by SEQ ID NO: 113 or SEQ ID NO: 116.

[0336] Another nucleic acid variant useful in performing the methods of the invention is an allelic variant of a nucleic acid encoding a RANBP as defined hereinabove. Allelic variants exist in nature, and encompassed within the methods of the present invention is the use of these natural alleles.

[0337] According to the present invention, there is provided a method for enhancing yield-related traits in plants, comprising introducing and preferentially expressing in plant seed or seed parts an allelic variant of a nucleic acid encoding a RANBP represented by any of the sequences listed in Table P, or comprising introducing and expressing in a plant an allelic variant of a nucleic acid encoding an orthologue, paralogue or homologue of any of the aforementioned SEQ ID NOs.

[0338] The allelic variant may be an allelic variant of a nucleic acid encoding a RANBP represented by any of SEQ ID NO: 114, SEQ ID NO 115, SEQ ID NO: 117 or SEQ ID NO: 118, or an allelic variant of a nucleic acid encoding orthologues or paralogues of any of the aforementioned SEQ ID NOs. Further preferred are allelic variants of nucleic acids represented by any one of the sequences listed in Table P. Most preferred is an allelic variant of a nucleic acid as represented by SEQ ID NO: 113 or 116.

[0339] A further nucleic acid variant useful in the methods of the invention is a nucleic acid variant designed and/or obtained by gene shuffling. Gene shuffling or directed evolution may be used to generate variants of nucleic acids encoding RANBPs as defined above.

[0340] According to the present invention, there is provided a method for enhancing yield-related traits in plants, comprising introducing and preferentially expressing in plant seed or seed parts a variant of a nucleic acid represented by any of the sequences listed in Table P, which variant nucleic acid is designed and/or obtained by gene shuffling.

[0341] Furthermore, nucleic acid variants may also be obtained by site-directed mutagenesis. Several methods are available to achieve site-directed mutagenesis, the most common being PCR based methods (current protocols in molecular biology. Wiley Eds.).

[0342] Nucleic acids encoding RANBPs may be derived from any natural or artificial source. The nucleic acid may be modified from its native form in composition and/or genomic environment through deliberate human manipulation. According to one preferred embodiment the RANBP-encoding nucleic acid is from a plant, further preferably from a monocot, more preferably from the family Poaceae, more preferably from the genus Zea, most preferably from Zea mays.

[0343] According to a further preferred embodiment, the RANBP-encoding nucleic acid is from a plant, further preferably from a dicotyledonous plant, further preferably from the family Brassicaceae, more preferably the nucleic acid is from Arabidopsis thaliana.

[0344] The present invention also encompasses plants or parts thereof obtainable by the methods according to the present invention. The plants or parts thereof comprise a nucleic acid transgene encoding a RANBP operably linked to a seed-specific promoter.

[0345] The invention also provides genetic constructs and vectors to facilitate introduction and/or expression of the nucleic acid sequences useful in the methods according to the invention, in a plant.

[0346] Therefore, there is provided a gene construct comprising:
[0347] (i) A nucleic acid encoding a RANBP comprising Motif I as defined hereinabove;
[0348] (ii) A seed-specific promoter operably liked to the nucleic acid of (i).

[0349] Constructs useful in the methods according to the present invention may be constructed using recombinant DNA technology well known to persons skilled in the art. The gene constructs may be inserted into vectors, which may be commercially available, suitable for transforming into plants and suitable for expression of the gene of interest in the transformed cells. The invention therefore provides use of a gene construct as defined hereinabove in the methods of the invention.

[0350] Plants are transformed with a vector comprising the sequence of interest (i.e., a nucleic acid encoding a RANBP). The skilled artisan is well aware of the genetic elements that must be present on the vector in order to successfully transform, select and propagate host cells containing the sequence of interest. The sequence of interest is operably linked to one or more control sequences (at least to a promoter). The terms “regulatory element”, “control sequence” and “promoter” are all used interchangeably herein and are defined above.

[0351] The nucleic acid encoding a RANBP is operably linked to a seed-specific promoter, i.e. a promoter that is expressed predominantly in seed tissue, but which may have residual expression elsewhere in the plant due to leaky promoter expression. Further preferably, the seed-specific promoter is isolated from a gene encoding a seed-storage protein, especially an endosperm-specific promoter. An endosperm-specific promoter refers to any promoter able to preferentially drive expression of the gene of interest in endosperm tissue. Reference herein to “preferentially” driving expression in endosperm tissue is taken to mean driving expression of any sequence operably linked thereto in endosperm tissue substantially to the exclusion of driving expression elsewhere in the plant, apart from any residual expression due to leaky promoter expression. For example, the prolamin promoter shows strong expression in the endosperm, with leakiness in meristem, more specifically the shoot meristem and/or discrimination centre in the meristem. Most preferably the endosperm-specific promoter is isolated from a prolamin gene, such as a rice prolamin RP6 (Wen et al., (1993) Plant Physiol 101(3): 1115-6) promoter as represented by SEQ ID NO: 155, or a promoter of similar strength and/or a promoter with a similar expression pattern as the rice prolamin promoter. Examples of other endosperm-specific promoters which may also be used perform the methods of the invention are shown in Table 2c above.

[0352] It should be clear that the applicability of the present invention is not restricted to the RANBP-encoding nucleic acid represented by SEQ ID NO: 113 or SEQ ID NO: 116, nor is the applicability of the invention restricted to expression of a such a RANBP-encoding nucleic acid when driven by a prolamin promoter. Examples of other seed-specific promoters which may also be used perform the methods of the invention are shown in Table 2b above.

[0353] Optionally, one or more terminator sequences (also a control sequence) may be used in the construct introduced into a plant. Additional regulatory elements may include transcriptional as well as translational enhancers. Those skilled in the art will be aware of terminator and enhancer sequences that may be suitable for use in performing the invention. Other control sequences, besides promoter, enhancer, silencer, intron sequences, 3′UTR and/or 5′UTR regions, may be protein and/or RNA stabilizing elements. Such sequences would be known or may readily be obtained by a person skilled in the art.

[0354] The genetic constructs of the invention may further include an origin of replication sequence that is required for maintenance and/or replication in a specific cell type. One example is when a genetic construct is required to be maintained in a bacterial cell as an episomal genetic element (e.g. plasmid or cosmid molecule). Preferred origins of replication include, but are not limited to, the f1-ori and colE1.

[0355] For the detection of the successful transfer of the nucleic acid sequences as used in the methods of the invention and/or selection of transgenic plants comprising these nucleic acids, it is advantageous to use marker genes (or reporter genes). Therefore, the genetic construct may optionally comprise a selectable marker gene. The marker genes may be removed or excised from the transgenic cell once they are no longer needed. Techniques for marker removal are known in the art, useful techniques are described above in the definitions section.

[0356] The invention also provides a method for the production of transgenic plants having enhanced yield-related traits relative to control plants, comprising introduction and preferential expression in plant seed or seed parts of a nucleic acid encoding a RANBP comprising Motif I as defined hereinabove.

[0357] More specifically, the present invention provides a method for the production of transgenic plants having enhanced yield-related traits, which method comprises:
[0358] (i) introducing and expressing in a plant cell a nucleic acid encoding a RANBP comprising Motif I (as defined herein) operably linked to seed-specific promoter; and
[0359] (ii) cultivating the plant cell under conditions promoting plant growth and development.

[0360] The nucleic acid may be introduced directly into a plant cell or into the plant itself (including introduction into a tissue, organ or any other part of a plant). According to a preferred feature of the present invention, the nucleic acid is preferably introduced into a plant by transformation.

[0361] The term “transformation” as referred to herein is described above.

[0362] The genetically modified plant cells can be regenerated via all methods with which the skilled worker is familiar. Suitable methods can be found in the abovementioned publications by S. D. Kung and R. Wu, Potrykus or Höfgen and Willmitzer.

[0363] Generally after transformation, plant cells or cell groupings are selected for the presence of one or more markers which are encoded by plant-expressible genes co-transferred with the gene of interest, following which the transformed material is regenerated into a whole plant. To select transformed plants, the plant material obtained in the transformation is, as a rule, subjected to selective conditions so that transformed plants can be distinguished from untransformed plants. For example, the seeds obtained in the above-described manner can be planted and, after an initial growing period, subjected to a suitable selection by spraying. A further possibility consists in growing the seeds, if appropriate after sterilization, on agar plates using a suitable selection agent so that only the transformed seeds can grow into plants. Alternatively, the transformed plants are screened for the presence of a selectable marker such as the ones described above.

[0364] Following DNA transfer and regeneration, putatively transformed plants may be evaluated, for instance using Southern analysis, for the presence of the gene of interest, copy number and/or genomic organisation. Alternatively or additionally, expression levels of the newly introduced DNA may be monitored using Northern and/or Western analysis, or quantitative PCR, all techniques being well known to persons having ordinary skill in the art.

[0365] The generated transformed plants may be propagated by a variety of means, such as by clonal propagation or classical breeding techniques. For example, a first generation (or T1) transformed plant may be selfed to give homozygous second generation (or T2) transformants, and the T2 plants further propagated through classical breeding techniques.

[0366] The generated transformed organisms may take a variety of forms. For example, they may be chimeras of transformed cells and non-transformed cells; clonal transformants (e.g., all cells transformed to contain the expression cassette); grafts of transformed and untransformed tissues (e.g., in plants, a transformed rootstock grafted to an untransformed scion).

[0367] The present invention clearly extends to any plant cell or plant produced by any of the methods described herein, and to all plant parts and propagules thereof. The present invention extends further to encompass the progeny of a primary transformed or transfected cell, tissue, organ or whole plant that has been produced by any of the aforementioned methods, the only requirement being that progeny exhibit the same genotypic and/or phenotypic characteristic(s) as those produced by the parent in the methods according to the invention.

[0368] The invention also includes host cells containing an isolated nucleic acid encoding a RANBP comprising Motif I as defined hereinabove. Preferred host cells according to the invention are plant cells. Host plants for the nucleic acids or the vector used in the method according to the invention, the expression cassette or construct or vector are, in principle, advantageously all plants, which are capable of synthesizing the polypeptides used in the inventive method.

[0369] The invention also extends to harvestable parts of a plant such as, but not limited to seeds, leaves, fruits, flowers, stems, roots, rhizomes, tubers and bulbs. The invention furthermore relates to products derived, preferably directly derived, from a harvestable part of such a plant, such as dry pellets or powders, oil, fat and fatty acids, starch or proteins.

[0370] According to a preferred feature of the invention, the modulated expression is increased expression. Methods for increasing expression of nucleic acids or genes, or gene products, are well documented in the art and examples are provided in the definitions section.

[0371] As mentioned above, a preferred method for preferentially modulating (preferably, increasing) expression in plant seed or seed parts of a nucleic acid encoding a RANBP is by introducing and expressing in a plant a nucleic acid encoding a RANBP comprising Motif I; however the effects of performing the method, i.e. enhancing yield-related traits may also be achieved using other well known techniques, including but not limited to T-DNA activation tagging, TILLING, homologous recombination. A description of some of these techniques is provided in the definitions section.

[0372] The effects of the invention may also be reproduced using homologous recombination. The nucleic acid to be targeted is preferably the region controlling the natural expression of a nucleic acid encoding a RANBP in a plant. A seed-specific promoter is introduced into this region, replacing substantially part or all of it.

[0373] Performance of the methods of the invention gives plants having enhanced yield-related traits. In particular performance of the methods of the invention gives plants having increased yield, especially increased biomass and seed yield relative to control plants. The terms “yield” and “seed yield” are described in more detail in the “definitions” section herein.

[0374] Reference herein to enhanced yield-related traits is taken to mean an increase in biomass (weight) of one or more parts of a plant, which may include aboveground (harvestable) parts and/or (harvestable) parts below ground. In particular, such harvestable parts are above ground biomass and seeds, and performance of the methods of the invention results in plants having increased biomass and increased seed yield relative to the seed yield of control plants.

[0375] Taking corn as an example, a yield increase may be manifested as one or more of the following: increase in the number of plants established per hectare or acre, an increase in the number of ears per plant, an increase in the number of rows, number of kernels per row, kernel weight, thousand kernel weight, ear length/diameter, increase in the seed filling rate (which is the number of filled seeds divided by the total number of seeds and multiplied by 100), among others. Taking rice as an example, a yield increase may manifest itself as an increase in one or more of the following: number of plants per hectare or acre, number of panicles per plant, number of spikelets per panicle, number of flowers (florets) per panicle (which is expressed as a ratio of the number of filled seeds over the number of primary panicles), increase in the seed filling rate (which is the number of filled seeds divided by the total number of seeds and multiplied by 100), increase in thousand kernel weight, among others.

[0376] The present invention provides a method for increasing yield, especially seed yield of plants, relative to control plants, which method comprises modulating expression, preferably increasing expression, in a plant of a nucleic acid encoding a RANBP polypeptide as defined herein.

[0377] Since the transgenic plants according to the present invention have increased yield, it is likely that these plants exhibit an increased growth rate (during at least part of their life cycle), relative to the growth rate of control plants at a corresponding stage in their life cycle.

[0378] The increased growth rate may be specific to one or more parts of a plant (including seeds), or may be throughout substantially the whole plant. Plants having an increased growth rate may have a shorter life cycle. The life cycle of a plant may be taken to mean the time needed to grow from a dry mature seed up to the stage where the plant has produced dry mature seeds, similar to the starting material. This life cycle may be influenced by factors such as early vigour, growth rate, greenness index, flowering time and speed of seed maturation. The increase in growth rate may take place at one or more stages in the life cycle of a plant or during substantially the whole plant life cycle. Increased growth rate during the early stages in the life cycle of a plant may reflect enhanced vigour. The increase in growth rate may alter the harvest cycle of a plant allowing plants to be sown later and/or harvested sooner than would otherwise be possible (a similar effect may be obtained with earlier flowering time). If the growth rate is sufficiently increased, it may allow for the further sowing of seeds of the same plant species (for example sowing and harvesting of rice plants followed by sowing and harvesting of further rice plants all within one conventional growing period). Similarly, if the growth rate is sufficiently increased, it may allow for the further sowing of seeds of different plants species (for example the sowing and harvesting of corn plants followed by, for example, the sowing and optional harvesting of soybean, potato or any other suitable plant). Harvesting additional times from the same rootstock in the case of some crop plants may also be possible. Altering the harvest cycle of a plant may lead to an increase in annual biomass production per acre (due to an increase in the number of times (say in a year) that any particular plant may be grown and harvested). An increase in growth rate may also allow for the cultivation of transgenic plants in a wider geographical area than their wild-type counterparts, since the territorial limitations for growing a crop are often determined by adverse environmental conditions either at the time of planting (early season) or at the time of harvesting (late season). Such adverse conditions may be avoided if the harvest cycle is shortened. The growth rate may be determined by deriving various parameters from growth curves, such parameters may be: T-Mid (the time taken for plants to reach 50% of their maximal size) and T-90 (time taken for plants to reach 90% of their maximal size), amongst others.

[0379] According to a preferred feature of the present invention, performance of the methods of the invention gives plants having an increased growth rate relative to control plants. Therefore, according to the present invention, there is provided a method for increasing the growth rate of plants, which method comprises modulating expression, preferably increasing expression, in a plant of a nucleic acid encoding a RANBP polypeptide as defined herein.

[0380] An increase in yield and/or growth rate occurs whether the plant is under non-stress conditions or whether the plant is exposed to various stresses compared to control plants. Plants typically respond to exposure to stress by growing more slowly. In conditions of severe stress, the plant may even stop growing altogether. Mild stress on the other hand is defined herein as being any stress to which a plant is exposed which does not result in the plant ceasing to grow altogether without the capacity to resume growth. Mild stress in the sense of the invention leads to a reduction in the growth of the stressed plants of less than 40%, 35% or 30%, preferably less than 25%, 20% or 15%, more preferably less than 14%, 13%, 12%, 11% or 10% or less in comparison to the control plant under non-stress conditions. Due to advances in agricultural practices (irrigation, fertilization, pesticide treatments) severe stresses are not often encountered in cultivated crop plants. As a consequence, the compromised growth induced by mild stress is often an undesirable feature for agriculture. Mild stresses are the everyday biotic and/or abiotic (environmental) stresses to which a plant is exposed. Abiotic stresses may be due to drought or excess water, anaerobic stress, salt stress, chemical toxicity, oxidative stress and hot, cold or freezing temperatures. The abiotic stress may be an osmotic stress caused by a water stress (particularly due to drought), salt stress, oxidative stress or an ionic stress. Biotic stresses are typically those stresses caused by pathogens, such as bacteria, viruses, fungi and insects.

[0381] In particular, the methods of the present invention may be performed under non-stress conditions or under conditions of mild drought to give plants having increased yield relative to control plants. As reported in Wang et al. (Planta (2003) 218: 1-14), abiotic stress leads to a series of morphological, physiological, biochemical and molecular changes that adversely affect plant growth and productivity. Drought, salinity, extreme temperatures and oxidative stress are known to be interconnected and may induce growth and cellular damage through similar mechanisms. Rabbani et al. (Plant Physiol (2003) 133: 1755-1767) describes a particularly high degree of “cross talk” between drought stress and high-salinity stress. For example, drought and/or salinisation are manifested primarily as osmotic stress, resulting in the disruption of homeostasis and ion distribution in the cell. Oxidative stress, which frequently accompanies high or low temperature, salinity or drought stress, may cause denaturing of functional and structural proteins. As a consequence, these diverse environmental stresses often activate similar cell signalling pathways and cellular responses, such as the production of stress proteins, up-regulation of anti-oxidants, accumulation of compatible solutes and growth arrest. The term “non-stress” conditions as used herein are those environmental conditions that allow optimal growth of plants. Persons skilled in the art are aware of normal soil conditions and climatic conditions for a given location.

[0382] Performance of the methods of the invention gives plants grown under non-stress conditions or under mild drought conditions increased yield relative to control plants grown under comparable conditions. Therefore, according to the present invention, there is provided a method for increasing yield in plants grown under non-stress conditions or under mild drought conditions, which method comprises increasing expression in a plant of a nucleic acid encoding a RANBP polypeptide.

[0383] Performance of the methods of the invention gives plants grown under conditions of nutrient deficiency, particularly under conditions of nitrogen deficiency, increased yield relative to control plants grown under comparable conditions. Therefore, according to the present invention, there is provided a method for increasing yield in plants grown under conditions of nutrient deficiency, which method comprises increasing expression in a plant of a nucleic acid encoding a RANBP polypeptide. Nutrient deficiency may result from a lack of nutrients such as nitrogen, phosphates and other phosphorous-containing compounds, potassium, calcium, cadmium, magnesium, manganese, iron and boron, amongst others.

[0384] The methods of the invention are advantageously applicable to any plant. Plants that are particularly useful in the methods of the invention include all plants which belong to the superfamily Viridiplantae, in particular monocotyledonous and dicotyledonous plants including fodder or forage legumes, ornamental plants, food crops, trees or shrubs. According to a preferred embodiment of the present invention, the plant is a crop plant. Examples of crop plants include soybean, sunflower, canola, alfalfa, rapeseed, cotton, tomato, potato and tobacco. Further preferably, the plant is a monocotyledonous plant. Examples of monocotyledonous plants include sugarcane. More preferably the plant is a cereal. Examples of cereals include rice, maize, wheat, barley, millet, rye, triticale, sorghum and oats.

[0385] The present invention also encompasses use of nucleic acids encoding RANBPs and use of RANBPs themselves in enhancing yield-related traits in plants.

[0386] Nucleic acids encoding RANBPs, or RANBPs themselves, may find use in breeding programmes in which a DNA marker is identified which may be genetically linked to a RANBP-encoding gene. The nucleic acids/genes, or the RANBPs themselves may be used to define a molecular marker. This DNA or protein marker may then be used in breeding programmes to select plants having increased yield as defined hereinabove in the methods of the invention.

[0387] Allelic variants of a RANBP-encoding acid/gene may also find use in marker-assisted breeding programmes. Such breeding programmes sometimes require introduction of allelic variation by mutagenic treatment of the plants, using for example EMS mutagenesis; alternatively, the programme may start with a collection of allelic variants of so called “natural” origin caused unintentionally. Identification of allelic variants then takes place, for example, by PCR. This is followed by a step for selection of superior allelic variants of the sequence in question and which give increased yield. Selection is typically carried out by monitoring growth performance of plants containing different allelic variants of the sequence in question. Growth performance may be monitored in a greenhouse or in the field. Further optional steps include crossing plants in which the superior allelic variant was identified with another plant. This could be used, for example, to make a combination of interesting phenotypic features.

[0388] A nucleic acid encoding a RANBP may also be used as probes for genetically and physically mapping the genes that they are a part of, and as markers for traits linked to those genes. Such information may be useful in plant breeding in order to develop lines with desired phenotypes. Such use of RANBP-encoding nucleic acids requires only a nucleic acid sequence of at least 15 nucleotides in length. The RANBP-encoding nucleic acids may be used as restriction fragment length polymorphism (RFLP) markers. Southern blots (Sambrook J, Fritsch EF and Maniatis T (1989) Molecular Cloning, A Laboratory Manual) of restriction-digested plant genomic DNA may be probed with the RANBP-encoding nucleic acids. The resulting banding patterns may then be subjected to genetic analyses using computer programs such as MapMaker (Lander et al. (1987) Genomics 1: 174-181) in order to construct a genetic map. In addition, the nucleic acids may be used to probe Southern blots containing restriction endonuclease-treated genomic DNAs of a set of individuals representing parent and progeny of a defined genetic cross. Segregation of the DNA polymorphisms is noted and used to calculate the position of the RANBP-encoding nucleic acid in the genetic map previously obtained using this population (Botstein et al. (1980) Am. J. Hum. Genet. 32:314-331).

[0389] The production and use of plant gene-derived probes for use in genetic mapping is described in Bematzky and Tanksley (1986) Plant Mol. Biol. Reporter 4: 37-41. Numerous publications describe genetic mapping of specific cDNA clones using the methodology outlined above or variations thereof. For example, F2 intercross populations, backcross populations, randomly mated populations, near isogenic lines, and other sets of individuals may be used for mapping. Such methodologies are well known to those skilled in the art.

[0390] The nucleic acid probes may also be used for physical mapping (i.e., placement of sequences on physical maps; see Hoheisel et al. In: Non-mammalian Genomic Analysis: A Practical Guide, Academic press 1996, pp. 319-346, and references cited therein).

[0391] In another embodiment, the nucleic acid probes may be used in direct fluorescence in situ hybridisation (FISH) mapping (Trask (1991) Trends Genet. 7:149-154). Although current methods of FISH mapping favor use of large clones (several kb to several hundred kb; see Laan et al. (1995) Genome Res. 5:13-20), improvements in sensitivity may allow performance of FISH mapping using shorter probes.

[0392] A variety of nucleic acid amplification-based methods for genetic and physical mapping may be carried out using the nucleic acids. Examples include allele-specific amplification (Kazazian (1989) J. Lab. Clin. Med 11:95-96), polymorphism of PCR-amplified fragments (CAPS; Sheffield et al. (1993) Genomics 16:325-332), allele-specific ligation Landegren et al. (1988) Science 241:1077-1080), nucleotide extension reactions (Sokolov (1990) Nucleic Acid Res. 18:3671), Radiation Hybrid Mapping (Walter et al. (1997) Nat. Genet. 7:22-28) and Happy Mapping (Dear and Cook (1989) Nucleic Acid Res. 17:6795-6807). For these methods, the sequence of a nucleic acid is used to design and produce primer pairs for use in the amplification reaction or in primer extension reactions. The design of such primers is well known to those skilled in the art. In methods employing PCR-based genetic mapping, it may be necessary to identify DNA sequence differences between the parents of the mapping cross in the region corresponding to the instant nucleic acid sequence. This, however, is generally not necessary for mapping methods.

[0393] The methods according to the present invention result in plants having enhnaced yield-related traits, as described hereinbefore. These traits may also be combined with other economically advantageous traits, such as further yield-enhancing traits, tolerance to other abiotic and biotic stresses, traits modifying various architectural features and/or biochemical and/or physiological features.

### GLK

[0394] It has now been found that modulating expression in a plant of a nucleic acid encoding a Golden2-like (GLK) protein gives plants having enhanced yield-related traits relative to control plants.

[0395] Therefore, the invention provides a method for enhancing yield-related traits in plants relative to control plants, comprising modulating expression in a plant of a nucleic acid encoding a GLK protein, or a part thereof.

[0396] A preferred method for modulating (preferably, increasing) expression of a nucleic acid encoding an Golden2-like protein (GLK) is by introducing and expressing in a plant a nucleic acid encoding such a GLK protein.

[0397] Any reference hereinafter to a “protein useful in the methods of the invention” is taken to mean a GLK polypeptide as defined herein. Any reference hereinafter to a “nucleic acid useful in the methods of the invention” is taken to mean a nucleic acid capable of encoding such a GLK polypeptide. The nucleic acid to be introduced into a plant (and therefore useful in performing the methods of the invention) is any nucleic acid encoding the type of protein which will now be described, hereafter also named “GLK nucleic acid” or “GLK gene”.

[0398] The nucleic acid to be introduced into a plant (and therefore useful in performing the methods of the invention) is any nucleic acid encoding a GLK protein (FIG. 11). The term “GLK protein” or “Golden2-like protein” refers to transcriptional regulator proteins comprising a GARP DNA-binding domain (Tamai et al., Plant Cell Physiol. 43, 99-107, 2002). It is postulated that the GARP domain is a multifunctional domain responsible for both nuclear localization and DNA binding (Hosoda et al., Plant Cell 14, 2015-2021, 2002). GLK proteins preferably also comprise an N-terminal region that is rich in acidic amino acids, a central part of about 100 amino acids enriched in basic amino acids and a C-terminal domain enriched in Pro residues. The C-terminal region preferably also comprises a GARP C-Terminal (GCT) domain (Rossini et al. 2001).

[0399] The terms “domain” and “motif” are defined in the definitions section herein. Specialist databases exist for the identification of domains. The GARP domain in a Golden2-like transcriptional regulator may be identified using, for example, SMART (Schultz et al. (1998) Proc. Natl. Acad. Sci. USA 95, 5857-5864; Letunic et al. (2002) Nucl. Acids Res 30, 242-244), InterPro (Mulder et al., (2003) Nucl. Acids. Res. 31, 315-318), Prosite (Bucher and Bairoch (1994), A generalized profile syntax for biomolecular sequences motifs and its function in automatic sequence interpretation. (In) ISMB-94; Proceedings 2nd International Conference on Intelligent Systems for Molecular Biology. Altman R., Brutlag D., Karp P., Lathrop R., Searls D., Eds., pp. 53-61, AAAI Press, Menlo Park; Hulo et al., Nucl. Acids. Res. 32:D134-D137, (2004)) or Pfam (Bateman et al., Nucleic Acids Research 30(1): 276-280 (2002)). A set of tools for in silico analysis of protein sequences is available on the ExPASY proteomics server (hosted by the Swiss Institute of Bioinformatics (Gasteiger et al., ExPASy: the proteomics server for in-depth protein knowledge and analysis, Nucleic Acids Res. 31:3784-3788 (2003)). Domains or motifs may also be identified using routine techniques, such as by sequence alignment.

[0400] The GARP DNA binding domain (Tamai et al. 2002) preferably has three or more of the following consensus sequences:

GARP consensus sequence 1 (SEQ ID NO: 161):
(K/R) (P/M/V/A) (R/K/M) (V/L) (V/D) W (S/T/I/N)
(V/AP/S/T/C/H/Q/D) (E/Q/T/D/S) L (H/D)
(R/K/Q/A/H/D/E/L/I) (K/R/Q/S/C/V/A/H) F (V/L/I)
(A/K/Q/E/H/D/N/R/S) (A/V/C) (V/G/L/I)
(N/E/A/Q/D/G/T/I/K/H) (Q/E/H/L/I/M/K/R/S)L
GARP consensus sequence 2 (SEQ ID NO: 162):
G (I/V/L/P/S/H/Q/A/G) (D/E/K/H/Q/N/A)
GARP consensus sequence 3 (SEQ ID NO: 163):
(A/T) (v/I/Y/F/T) P (K/S) (K/R/T/Q/L/S/G/A)
(I/V/L) (L/M/R/K) (D/E/Q/K/R/S)
(L/I/F/H/V/M/T/R/A) (M/I/L) (N/K/G/S/D/Q/E)
GARP consensus sequence 4 (SEQ ID NO: 164):
(V/I/M/T/E/L/S/N) (E/D/G/N/Y/K/H/Q/P)
(N/G/K/T/S/C/R/D) (I/L) (T/D/A/S) (R/N/I/L/V)
(E/H/D/S/A/Y/F) (N/E/H)
GARP consensus sequence 5 (SEQ ID NO: 165):
(V/I/L) (A/K) SHLQ (K/M/I) (Y/F) (R/V)

[0401] More preferably, the GARP consensus sequences have respectively the following sequences:

1: (K/R) (P/M/V/A) (R/K/M) (V/L) (V/D) W (S/T/I)
(V/A/P) (E/Q) LH (R/K/Q) (K/R/Q) FV (A/K/Q/E/H/D)
A (V/G) (N/E/A) (Q/E/H) L
2: G (I/V/L) (D/E/K)
3: A (V/I/Y/F) P (K/S) (K/R/T) I (L/M) (D/E/Q)
(L/I) M (N/K/G/S)
4: (V/I/M/T/E) (E/D/G/N/Y/K/H/Q/P) (N/G/K/T/S/C/R)
(I/L) (T/D) R (E/H) N
5: (V/I) ASHLQK (Y/F) R

[0402] Furthermore preferably, the GARP consensus sequences have respectively the following sequences:

1: K (P/V/A) KVDWTPELHR (K/R) FV (Q/E/H) A (V/G) E
(Q/E) L
2: G (I/V/L) (D/E)
3: A (V/Y/F) PSRILE (L/I) M (N/G)
4: (V/I/M/T/E) (E/D/N/Y/K/H/Q) (S/C/R) LTRHN
5: (V/I) ASHLQKYR

[0403] Even furthermore preferably, the GARP consensus sequences have respectively the following sequences:

1: K (V/A) KVDWTPELHRRFVQA (V/G) E (Q/E) L
2: G (I/V/L) D
3: AVPSRILE (L/I) MG
4: (I/M/T/E) (E/D/N/Y) (S/C/R) LTRHN
5: IASHLQKYR

[0404] Most preferably, the GARP consensus sequences have respectively the following sequences:

1: KAKVDWTPELHRRFVQAVEQL
2: GID
3: AVPSRILEIMG
4: IDSLTRHN
5: IASHLQKYR

[0405] Optionally, the GARP consensus sequence 5 is followed by another conserved motif (consensus sequence 6, SEQ ID NO: 166):

SHR (K/R) H (L/M) (L/A/M/I) ARE (A/G/V) EA (A/G)
(S/N/T) W

[0406] Preferably this consensus sequence 6 has the sequence:

SHRKH (L/M) (L/M/I) ARE (A/G/V) EA (A/G) (S/N) W

[0407] More preferably consensus sequence 6 has the sequence:

SHRKHMIAREAEAASW

[0408] A MYB domain motif may, but does not need to, be present in the GARP domain (FIG. 12). This MYB domain may correspond to the Pfam entry PF00249 and InterPro entry IPROO1005, and may comprise the Prosite pattern PS00037 (W-[ST]-{W}-{PTLN}-E-[DE]-{GIYS}-{GYPH}-[LIV].) or Prosite pattern PS00334 (W-x(2)-[LI]-[SAG]-x(4,5)-R-{RE}-x(3)-{AG}-x(3)-[YW]-x(3)-[LIVM].) or Prosite pattern PS50090.

[0409] GLK proteins useful in the present invention preferably (but not necessarily) also comprise a GCT domain (Rossini et al., 2001). A consensus sequences for this GCT domain is given in SEQ ID NO: 167:

(H/Q) (P/L) S (N/K/S) E (S/V) (I/V/L) DAAIG (D/E)
(V/A) (I/L) (S/T/A/V) (N/K/R) PW (L/T) P (L/P) PLG
L (K/N) PP (S/A) (V/M/L) (D/E/G) (G/S) V (M/I) (T/
A/S/G) EL (Q/H/E) (R/K) (Q/H) G (V/I) (S/N/P/A)
(N/E/T/K) (V/I) P (P/Q)

[0410] Preferably, this GCT consensus domain has the sequence:

(H/Q) PS (N/K/S) ESIDAAIGD (V/A) L (S/T/V) KPW
(L/T) PLPLGLKPPS (V/L) (D/G)SV (M/I) (S/G) EL
(Q/H/E) RQG (V/I) (P/A) (N/K) (V/I) P (P/Q)

[0411] More preferably, this GCT consensus domain has the sequence:

QPSSESIDAAIGDVLSKPWLPLPLGLKPPSVDSVMGELQRQGVANVPP

[0412] GLK proteins are known to have a higher than average content of acidic amino acids (D and E) in the N-terminal region (from N-terminus to the start of the GARP domain, FIG. 11, FIG. 12), preferably the content is in increasing order of preference, higher than 12%, 15%, 20%, but lower than 30%. Typically the content of D and E in the N-terminal region is around 23%, whereas the average content of D and E in proteins is around 11.9% (Table 3). Similarly, the C-terminal region starting at the end of the GARP domain and including the GCT domain is enriched in Pro residues. Whereas an average protein has a Pro content of 4.8%, the Pro content in this C-terminal region is 25.4% for SEQ ID NO: 157. The P content may vary in this region between 10 and 30%. (range: PpGLK1:11.23, PpGLK2: 11.17, ZmG2: 20.73, ZmGLK1: 23.30, AtGLK2, 17.6%, AtGLK1: 20.13

TABLE 3
Mean amino acid composition of proteins in SWISS PROT
(July 2004):

| Residue | Mole % |
|---|---|
| A = Ala | 7.80 |
| C = Cys | 1.57 |
| D = Asp | 5.30 |
| E = Glu | 6.59 |
| F = Phe | 4.02 |
| G = Gly | 6.93 |
| H = His | 2.27 |
| I = Ile | 5.91 |
| K = Lys | 5.93 |
| L = Leu | 9.62 |
| M = Met | 2.37 |
| N = Asn | 4.22 |
| P = Pro | 4.85 |
| Q = Gln | 3.93 |
| R = Arg | 5.29 |
| S = Ser | 6.89 |
| T = Thr | 5.46 |
| V = Val | 6.69 |
| W = Trp | 1.16 |
| Y = Tyr | 3.09 |

[0413] Examples of GLK proteins as defined herein include the protein represented by SEQ ID NO 157, but the term “GLK proteins” also encompasses orthologues or paralogues of the aforementioned SEQ ID NO: 157. The invention is illustrated by transforming plants with the Oryza sativa sequence represented by SEQ ID NO: 156, encoding the polypeptide of SEQ ID NO: 157. SEQ ID NO: 169 (from Oryza sativa, encoded by SEQ ID NO: 168) is a paralogue of the polypeptide of SEQ ID NO: 157 whereas SEQ ID NO: 171 and 173 from Arabidopsis thaliana (encoded by SEQ ID NO: 170 and 172), SEQ ID NO: 175 and 177 from Physcomitrella patens (encoded by SEQ ID NO: 174 and 176), SEQ ID NO: 179 and 181 from Zea mays (encoded by SEQ ID NO: 178 and 180), SEQ ID NO: 183, a partial sequence from Triticum aestivum, and SEQ ID NO: 189, a partial sequence from Sorghum bicolor, are examples of orthologues of the protein of SEQ ID NO: 157. SEQ ID NO: 193 represents a variant of the protein of SEQ ID NO: 157.

[0414] Orthologues and paralogues may easily be found by performing a so-called reciprocal blast search. This may be done by a first BLAST involving BLASTing a query sequence (for example, SEQ ID NO: 156 or SEQ ID NO: 157) against any sequence database, such as the publicly available NCBI database. BLASTN or TBLASTX (using standard default values) may be used when starting from a nucleotide sequence and BLASTP or TBLASTN (using standard default values) may be used when starting from a protein sequence. The BLAST results may optionally be filtered. The full-length sequences of either the filtered results or non-filtered results are then BLASTed back (second BLAST) against sequences from the organism from which the query sequence is derived (where the query sequence is SEQ ID NO: 156 or SEQ ID NO: 157, the second BLAST would therefore be against rice sequences). The results of the first and second BLASTs are then compared. A paralogue is identified if a high-ranking hit from the second BLAST is from the same species as from which the query sequence is derived; an orthologue is identified if a high-ranking hit is not from the same species as from which the query sequence is derived. Preferred orthologues are orthologues of SEQ ID NO: 156 or SEQ ID NO: 157. High-ranking hits are those having a low E-value. The lower the E-value, the more significant the score (or in other words the lower the chance that the hit was found by chance). Computation of the E-value is well known in the art. In addition to E-values, comparisons are also scored by percentage identity. Percentage identity refers to the number of identical nucleotides (or amino acids) between the two compared nucleic acid (or polypeptide) sequences over a particular length. Preferably the score is greater than 50, more preferably greater than 100; and preferably the E-value is less than e-5, more preferably less than e-6. In the case of large families, ClustalW may be used, followed by the generation of a neighbour joining tree, to help visualize clustering of related genes and to identify orthologues and paralogues.

[0415] Homologues (or homologous proteins, encompassing orthologues and paralogues) may readily be identified using routine techniques well known in the art, such as by sequence alignment. Methods for the alignment of sequences for comparison are well known in the art, such methods include GAP, BESTFIT, BLAST, FASTA and TFASTA. GAP uses the algorithm of Needleman and Wunsch ((1970) J Mol Biol 48: 443-453) to find the alignment of two complete sequences that maximizes the number of matches and minimizes the number of gaps. The BLAST algorithm (Altschul et al. (1990) J Mol Biol 215: 403-410) calculates percent sequence identity and performs a statistical analysis of the similarity between the two sequences. The software for performing BLAST analysis is publicly available through the National Centre for Biotechnology Information. Homologues may readily be identified using, for example, the ClustalW multiple sequence alignment algorithm (version 1.83), with the default pairwise alignment parameters, and a scoring method in percentage. Global percentages of similarity and identity may also be determined using one of the methods available in the MatGAT software package (Campanella et al., BMC Bioinformatics. 4, 29, 2003). Minor manual editing may be performed to optimise alignment between conserved motifs, as would be apparent to a person skilled in the art. Furthermore, instead of using full-length sequences for the identification of homologues, specific domains (such as the GARP domain or the GCT domain) may be used as well.

[0416] Preferably, the GLK proteins useful in the methods of the present invention have, in increasing order of preference, at least 30%, 35%, 40%, 45%, 50%, 55%, 60%, 65%, 70%, 75%, 80%, 85%, 90%, 95%, 96%, 97%, 98% or 99% sequence identity to the protein of SEQ ID NO: 157. Alternatively, the sequence identity among homologues may be determined using a specific domain (such as the GARP domain or the GCT domain). A GARP or GCT domain may be identified and delineated using the databases and tools for protein identification listed above, and/or methods for the alignment of sequences for comparison. In some instances, default parameters may be adjusted to modify the stringency of the search. For example using BLAST, the statistical significance threshold (called “expect” value) for reporting matches against database sequences may be increased to show less stringent matches. In this way, short nearly exact matches may be identified.

[0417] An example detailing the identification of homologues is given in Example 21. The matrices shown in Example 22 shows similarities and identities (in bold) over the GARP or GCT domain, where of course the values are higher than when considering the full-length protein.

[0418] The nucleic acid encoding the polypeptide represented by any one of SEQ ID NO 157, SEQ ID NO: 193, or orthologues or paralogues of any of the aforementioned SEQ ID NOs, need not be full-length nucleic acids, since performance of the methods of the invention does not rely on the use of full length nucleic acid sequences. Furthermore, examples of nucleic acids suitable for use in performing the methods of the invention include but are not limited to those listed in Table Q of Example 21. Nucleic acid variants may also be useful in practising the methods of the invention. Examples of such variants include portions of nucleic acids, hybridising sequences, splice variants, allelic variants either naturally occurring or by DNA manipulation.

[0419] The term “portion” as used herein refers to a piece of DNA encoding a polypeptide comprising at least a GARP domain as described above, and preferably also, from N-terminus to C-terminus, (i) a region enriched in acidic nucleic acids (D or E), preceding the GARP domain and (ii) a region C-terminal of the GARP domain which is enriched in Pro residues and preferably comprises a GCT domain.

[0420] A portion may be prepared, for example, by making one or more deletions to a nucleic acid encoding a GLK protein as defined hereinabove. The portions may be used in isolated form or they may be fused to other coding (or non coding) sequences in order to, for example, produce a protein that combines several activities. When fused to other coding sequences, the resultant polypeptide produced upon translation may be bigger than that predicted for the GLK portion. Portions useful in the methods of the invention, encode a polypeptide having a GARP domain (as described above) and having substantially the same biological activity as the GLK protein represented by any of SEQ ID NO: 157, SEQ ID NO: 193 or orthologues or paralogues of any of the aforementioned SEQ ID NOs. The portion is typically at least 800 nucleotides in length, preferably at least 900 nucleotides in length, more preferably at least 1000 nucleotides in length and most preferably at least 1100 nucleotides in length. Preferably, the portion is a portion of a nucleic acid as represented by any one of the sequences listed in Table Q of Example 21. Most preferably the portion is a portion of a nucleic acid as represented by SEQ ID NO: 156.

[0421] According to the present invention, there is provided a method for enhancing yield-related traits in plants, comprising introducing and expressing in a plant a portion of any one of the nucleic acid sequences given in Table Q of Example 21, or a portion of a nucleic acid encoding an orthologue, paralogue or homologue of any of the amino acid sequences given in Table Q of Example 21.

[0422] Another nucleic acid variant useful in the methods of the invention is a nucleic acid capable of hybridising under reduced stringency conditions, preferably under stringent conditions, with a nucleic acid encoding a GLK protein as defined hereinabove, or a with a portion as defined hereinabove.

[0423] Hybridising sequences useful in the methods of the invention, encode a polypeptide having a N-terminal region enriched in acidic nucleic acids (D or E), a GARP domain and a region C-terminal of the GARP domain which is enriched in Pro residues and which preferably comprises a GCT domain (as described above) and having substantially the same biological activity as the GLK protein represented by any of SEQ ID NO: 157, SEQ ID NO 193 or orthologues or paralogues of any of the aforementioned SEQ ID NOs. The hybridising sequence is typically at least 800 nucleotides in length, preferably at least 900 nucleotides in length, more preferably at least 1000 nucleotides in length and most preferably at least 1100 nucleotides in length. Preferably, the hybridising sequence is one that is capable of hybridising to any of the nucleic acids represented by (or to probes derived from) the sequences listed in Table Q of Example 21, or to a portion of any of the aforementioned sequences, a portion being as defined above. Most preferably the hybridising sequence is capable of hybridising to SEQ ID NO: 156, or to portions (or probes) thereof. Methods for designing probes are well known in the art. Probes are generally less than 1000 bp in length, preferably less than 500 bp in length. Commonly, probe lengths for DNA-DNA hybridisations such as Southern blotting, vary between 100 and 500 bp, whereas the hybridising region in probes for DNA-DNA hybridisations such as in PCR amplification generally are shorter than 50 but longer than 10 nucleotides. According to the present invention, there is provided a method for enhancing yield-related traits in plants, comprising introducing and expressing in a plant a nucleic acid capable of hybridizing to any one of the nucleic acids given in Table Q of Example 21, or comprising introducing and expressing in a plant a nucleic acid capable of hybridising to a nucleic acid encoding an orthologue, paralogue or homologue of any of the nucleic acid sequences given in Table Q of Example 21.

[0424] Another nucleic acid variant useful in the methods of the invention is a splice variant encoding a GLK protein as defined hereinabove.

[0425] Preferred splice variants are splice variants of a nucleic acid encoding GLK proteins represented by any of SEQ ID NO: 157, SEQ ID NO 193, or splice variants encoding orthologues or paralogues of any of the aforementioned SEQ ID NOs. Further preferred are splice variants of nucleic acids represented by any one of the sequences listed in Table Q of Example 21. Most preferred is a splice variant of a nucleic acid as represented by SEQ ID NO: 156.

[0426] According to the present invention, there is provided a method for enhancing yield-related traits in plants, comprising introducing and expressing in a plant a splice variant of any one of the nucleic acid sequences given in Table Q of Example 21, or a splice variant of a nucleic acid encoding an orthologue, paralogue or homologue of any of the amino acid sequences given in Table Q of Example 21.

[0427] Another nucleic acid variant useful in performing the methods of the invention is an allelic variant of a nucleic acid encoding a GLK protein as defined hereinabove. Allelic variants exist in nature, and encompassed within the methods of the present invention is the use of these natural alleles. The allelic variant may be an allelic variant of a nucleic acid encoding a GLK protein represented by any of SEQ ID NO: 157, SEQ ID NO 193, or an allelic variant of a nucleic acid encoding orthologues or paralogues of any of the aforementioned SEQ ID NOs.

[0428] Further preferred are allelic variants of nucleic acids represented by any one of the sequences listed in Table Q of Example 21. Most preferred is an allelic variant of a nucleic acid as represented by SEQ ID NO: 156, such as SEQ ID NO: 192.

[0429] According to the present invention, there is provided a method for enhancing yield-related traits in plants, comprising introducing and expressing in a plant an allelic variant of any one of the nucleic acids given in Table Q of Example 21, or comprising introducing and expressing in a plant an allelic variant of a nucleic acid encoding an orthologue, paralogue or homologue of any of the amino acid sequences given in Table Q of Example 21.

[0430] A further nucleic acid variant useful in the methods of the invention is a nucleic acid variant obtained by gene shuffling. Gene shuffling or directed evolution may also be used to generate variants of nucleic acids encoding GLK proteins as defined above. According to the present invention, there is provided a method for enhancing yield-related traits in plants, comprising introducing and expressing in a plant a variant of any one of the nucleic acid sequences given in Table Q of Example 21, or comprising introducing and expressing in a plant a variant of a nucleic acid encoding an orthologue, paralogue or homologue of any of the amino acid sequences given in Table Q of Example 21, which variant nucleic acid is obtained by gene shuffling.

[0431] Furthermore, nucleic acid variants may also be obtained by site-directed mutagenesis. Several methods are available to achieve site-directed mutagenesis, the most common being PCR based methods (Current Protocols in Molecular Biology. Wiley Eds.). Preferred mutants are those that result in a tissue identity switch from C3 tissue structure to the Kranz anatomy of C4 plants.

[0432] Also useful in the methods of the invention are nucleic acids encoding homologues of any one of the amino acids represented by SEQ ID NO 157, SEQ ID NO 193, or orthologues or paralogues of any of the aforementioned SEQ ID NOs.

[0433] Also useful in the methods of the invention are nucleic acids encoding derivatives of any one of the amino acid sequences represented by SEQ ID NO 157, SEQ ID NO 193 or of orthologues or paralogues of any of the aforementioned SEQ ID NOs.

[0434] Furthermore, GLK proteins useful in the methods of the present invention (at least in their native form) typically, but not necessarily, have transcriptional regulatory activity. Therefore, GLK proteins with reduced transcriptional regulatory activity or without transcriptional regulatory activity may equally be useful in the methods of the present invention. A person skilled in the art may easily determine the presence of DNA binding activity or transcriptional activation using routine tools and techniques. To determine the DNA binding activity of GLK proteins, several assays are available (for example Current Protocols in Molecular Biology, Volumes 1 and 2, Ausubel et al. (1994), Current Protocols). In particular, a DNA binding assay for transcription factors comprising a GARP domain is described by Hosoda et al. (2002), including a PCR-assisted DNA binding site selection and a DNA binding gel-shift assay. Alternatively, the approach of Tamai et al. (2002) could be used, where the Arabidopsis GPRI1 was used in an assay for driving transcription of a lacZ reporter gene; Rossini et al 2001 furthermore describe a yeast GAL4 transactivation assay.

[0435] Nucleic acids encoding GLK proteins may be derived from any natural or artificial source. The nucleic acid may be modified from its native form in composition and/or genomic environment through deliberate human manipulation. Preferably the GLK protein-encoding nucleic acid is from a plant, further preferably from a monocotyledonous plant, more preferably from the family of Poaceae, most preferably the nucleic acid is from Oryza sativa.

[0436] The invention also provides genetic constructs and vectors to facilitate introduction and/or expression of the nucleic acid sequences useful in the methods according to the invention, in a plant.

[0437] Therefore, there is provided a gene construct comprising:
[0438] (i) a nucleic acid encoding a GLK protein as defined hereinabove;
[0439] (ii) one or more control sequences operably linked to the nucleic acid of (i).

[0440] Constructs useful in the methods according to the present invention may be constructed using recombinant DNA technology well known to persons skilled in the art. The gene constructs may be inserted into vectors, which may be commercially available, suitable for transforming into plants and suitable for expression of the gene of interest in the transformed cells. The invention therefore provides use of a gene construct as defined hereinabove in the methods of the invention. Preferably, the gene construct is for driving GLK expression in plants.

[0441] Plants are transformed with a vector comprising the sequence of interest (i.e., a nucleic acid encoding a GLK protein). The skilled artisan is well aware of the genetic elements that must be present on the vector in order to successfully transform, select and propagate host cells containing the sequence of interest. The sequence of interest is operably linked to one or more control sequences (at least to a promoter).

[0442] Advantageously, any type of promoter may be used to drive expression of the nucleic acid sequence. Preferably, the GLK encoding nucleic acid or variant thereof is operably linked to a constitutive promoter. A constitutive promoter is transcriptionally active during most, but not necessarily all, phases of its growth and development and under most environmental conditions in at least one cell, tissue or organ. A preferred constitutive promoter is a constitutive promoter that is also substantially ubiquitously expressed. Further preferably the promoter is derived from a plant, more preferably a monocotyledonous plant. Most preferred is use of a GOS2 promoter (from rice) (SEQ ID NO: 160 or SEQ ID NO: 58). It should be clear that the applicability of the present invention is not restricted to the GLK encoding nucleic acid represented by SEQ ID NO: 156 or SEQ ID NO: 192, nor is the applicability of the invention restricted to expression of a nucleic acid encoding a GLK protein when driven by a GOS2 promoter. Examples of other constitutive promoters which may also be used to drive expression of a nucleic acid encoding a GLK protein are shown in the Definitions section above.

[0443] Optionally, one or more terminator sequences may be used in the construct introduced into a plant. Additional regulatory elements may include transcriptional as well as translational enhancers. Those skilled in the art will be aware of terminator and enhancer sequences that may be suitable for use in performing the invention. An intron sequence may also be added to the 5′ untranslated region (UTR) or in the coding sequence to increase the amount of the mature message that accumulates in the cytosol, as described in the definitions section. Other control sequences (besides promoter, enhancer, silencer, intron sequences, 3′UTRand/or 5′UTR regions) may be protein and/or RNA stabilizing elements. Such sequences would be known or may readily be obtained by a person skilled in the art.

[0444] The genetic constructs of the invention may further include an origin of replication sequence that is required for maintenance and/or replication in a specific cell type. One example is when a genetic construct is required to be maintained in a bacterial cell as an episomal genetic element (e.g. plasmid or cosmid molecule). Preferred origins of replication include, but are not limited to, the f1-ori and colE1.

[0445] For the detection of the successful transfer of the nucleic acid sequences as used in the methods of the invention and/or selection of transgenic plants comprising these nucleic acids, it is advantageous to use marker genes (or reporter genes). Therefore, the genetic construct may optionally comprise a selectable marker gene. Selectable markers are described in more detail in the “definitions” section herein. The marker genes may be removed or excised from the transgenic cell once they are no longer needed. Techniques for marker removal are known in the art, useful techniques are described above in the definitions section.

[0446] The invention also provides a method for the production of transgenic plants having altered yield-related trait relative to control plants, comprising introduction and expression in a plant of a nucleic acid encoding a GLK polypeptide as defined hereinabove.

[0447] More specifically, the present invention provides a method for the production of transgenic plants having altered yield-related traits, which method comprises:
[0448] (i) introducing and expressing a nucleic acid encoding a GLK protein in a plant cell; and
[0449] (ii) cultivating the plant cell under conditions promoting plant growth and development.

[0450] The nucleic acid may be introduced directly into a plant cell or into the plant itself (including introduction into a tissue, organ or any other part of a plant). According to a preferred feature of the present invention, the nucleic acid is preferably introduced into a plant by transformation. The term “transformation” is described in more detail in the definitions section herein.

[0451] Generally after transformation, plant cells or cell groupings are selected for the presence of one or more markers which are encoded by plant-expressible genes co-transferred with the gene of interest, following which the transformed material is regenerated into a whole plant. To select transformed plants, the plant material obtained in the transformation is, as a rule, subjected to selective conditions so that transformed plants can be distinguished from untransformed plants. For example, the seeds obtained in the above-described manner can be planted and, after an initial growing period, subjected to a suitable selection by spraying. A further possibility consists in growing the seeds, if appropriate after sterilization, on agar plates using a suitable selection agent so that only the transformed seeds can grow into plants. Alternatively, the transformed plants are screened for the presence of a selectable marker such as the ones described above.

[0452] Following DNA transfer and regeneration, putatively transformed plants may be evaluated, for instance using Southern analysis, for the presence of the gene of interest, copy number and/or genomic organisation. Alternatively or additionally, expression levels of the newly introduced DNA may be monitored using Northern and/or Western analysis, or quantitative PCR, all techniques being well known to persons having ordinary skill in the art.

[0453] The generated transformed plants may be propagated by a variety of means, such as by clonal propagation or classical breeding techniques. For example, a first generation (or T1) transformed plant may be selfed to give homozygous second generation (or T2) transformants, and the T2 plants further propagated through classical breeding techniques.

[0454] The generated transformed organisms may take a variety of forms. For example, they may be chimeras of transformed cells and non-transformed cells; clonal transformants (e.g., all cells transformed to contain the expression cassette); grafts of transformed and untransformed tissues (e.g., in plants, a transformed rootstock grafted to an untransformed scion).

[0455] The present invention clearly extends to any plant cell or plant produced by any of the methods described herein, and to all plant parts and propagules thereof. The present invention extends further to encompass the progeny of a primary transformed or transfected cell, tissue, organ or whole plant that has been produced by any of the aforementioned methods, the only requirement being that progeny exhibit the same genotypic and/or phenotypic characteristic(s) as those produced by the parent in the methods according to the invention.

[0456] The invention also includes host cells containing an isolated nucleic acid encoding a GLK protein as defined hereinabove. Preferred host cells according to the invention are plant cells. Host plants for the nucleic acids or the vector used in the method according to the invention, the expression cassette or construct or vector are, in principle, advantageously all plants, which are capable of synthesizing the polypeptides used in the inventive method.

[0457] The invention also extends to harvestable parts of a plant such as, but not limited to seeds, leaves, fruits, flowers, stems, roots, rhizomes, roots, tubers and bulbs. The invention furthermore relates to products derived, preferably directly derived, from a harvestable part of such a plant, such as dry pellets or powders, oil, fat and fatty acids, starch or proteins.

[0458] According to a preferred feature of the invention, the modulated expression is increased expression. Methods for increasing expression of nucleic acids or genes, or gene products, are well documented in the art and examples are provided in the definitions section.

[0459] As mentioned above, a preferred method for modulating (preferably, increasing) expression of a nucleic acid encoding a GLK protein is by introducing and expressing in a plant a nucleic acid encoding a GLK protein; however the effects of performing the method, i.e. altering yield-related traits may also be achieved using other well known techniques, including but not limited to T-DNA activation tagging, TILLING, homologous recombination. A description of some of these techniques is provided in the definitions section.

[0460] Performance of the methods of the invention gives plants having enhanced yield-related traits. In particular performance of the methods of the invention gives plants having increased yield, especially increased seed yield relative to control plants. The terms “yield” and “seed yield” are described in more detail in the “definitions” section herein.

[0461] Reference herein to enhanced yield-related traits is taken to mean an increase in biomass (weight) of one or more parts of a plant, which may include aboveground (harvestable) parts and/or (harvestable) parts below ground. In particular, such harvestable parts are above ground biomass and/or seeds, and performance of the methods of the invention results in plants having increased seed yield and/or increased above ground biomass, relative to the seed yield and/or biomass of control plants.

[0462] Taking corn as an example, a yield increase may be manifested as one or more of the following: increase in the number of plants established per hectare or acre, an increase in the number of ears per plant, an increase in the number of rows, number of kernels per row, kernel weight, thousand kernel weight, ear length/diameter, increase in the seed filling rate (which is the number of filled seeds divided by the total number of seeds and multiplied by 100), among others. Taking rice as an example, a yield increase may manifest itself as an increase in one or more of the following: number of plants per hectare or acre, number of panicles per plant, number of spikelets per panicle, number of flowers (florets) per panicle (which is expressed as a ratio of the number of filled seeds over the number of primary panicles), increase in the seed filling rate (which is the number of filled seeds divided by the total number of seeds and multiplied by 100), increase in thousand kernel weight, among others.

[0463] The present invention provides a method for increasing yield, especially above ground biomass and/or seed yield of plants, relative to control plants, which method comprises modulating expression, preferably increasing expression, in a plant of a nucleic acid encoding a GLK polypeptide as defined herein.

[0464] Since the transgenic plants according to the present invention have increased yield, it is likely that these plants exhibit an increased growth rate (during at least part of their life cycle), relative to the growth rate of control plants at a corresponding stage in their life cycle.

[0465] The increased growth rate may be specific to one or more parts of a plant (including seeds), or may be throughout substantially the whole plant. Plants having an increased growth rate may have a shorter life cycle. The life cycle of a plant may be taken to mean the time needed to grow from a dry mature seed up to the stage where the plant has produced dry mature seeds, similar to the starting material. This life cycle may be influenced by factors such as early vigour, growth rate, greenness index, flowering time and speed of seed maturation. The increase in growth rate may take place at one or more stages in the life cycle of a plant or during substantially the whole plant life cycle. Increased growth rate during the early stages in the life cycle of a plant may reflect enhanced vigour. The increase in growth rate may alter the harvest cycle of a plant allowing plants to be sown later and/or harvested sooner than would otherwise be possible (a similar effect may be obtained with earlier flowering time). If the growth rate is sufficiently increased, it may allow for the further sowing of seeds of the same plant species (for example sowing and harvesting of rice plants followed by sowing and harvesting of further rice plants all within one conventional growing period). Similarly, if the growth rate is sufficiently increased, it may allow for the further sowing of seeds of different plants species (for example the sowing and harvesting of corn plants followed by, for example, the sowing and optional harvesting of soybean, potato or any other suitable plant). Harvesting additional times from the same rootstock in the case of some crop plants may also be possible. Altering the harvest cycle of a plant may lead to an increase in annual biomass production per acre (due to an increase in the number of times (say in a year) that any particular plant may be grown and harvested). An increase in growth rate may also allow for the cultivation of transgenic plants in a wider geographical area than their wild-type counterparts, since the territorial limitations for growing a crop are often determined by adverse environmental conditions either at the time of planting (early season) or at the time of harvesting (late season). Such adverse conditions may be avoided if the harvest cycle is shortened. The growth rate may be determined by deriving various parameters from growth curves, such parameters may be: T-Mid (the time taken for plants to reach 50% of their maximal size) and T-90 (time taken for plants to reach 90% of their maximal size), amongst others.

[0466] According to a preferred feature of the present invention, performance of the methods of the invention gives plants having an increased growth rate relative to control plants. Therefore, according to the present invention, there is provided a method for increasing the growth rate of plants, which method comprises modulating expression, preferably increasing expression, in a plant of a nucleic acid encoding a GLK polypeptide as defined herein.

[0467] An increase in yield and/or growth rate occurs whether the plant is under non-stress conditions or whether the plant is exposed to various stresses compared to control plants. Plants typically respond to exposure to stress by growing more slowly. In conditions of severe stress, the plant may even stop growing altogether. Mild stress on the other hand is defined herein as being any stress to which a plant is exposed which does not result in the plant ceasing to grow altogether without the capacity to resume growth. Mild stress in the sense of the invention leads to a reduction in the growth of the stressed plants of less than 40%, 35% or 30%, preferably less than 25%, 20% or 15%, more preferably less than 14%, 13%, 12%, 11% or 10% or less in comparison to the control plant under non-stress conditions. Due to advances in agricultural practices (irrigation, fertilization, pesticide treatments) severe stresses are not often encountered in cultivated crop plants. As a consequence, the compromised growth induced by mild stress is often an undesirable feature for agriculture. Mild stresses are the everyday biotic and/or abiotic (environmental) stresses to which a plant is exposed. Abiotic stresses may be due to drought or excess water, anaerobic stress, salt stress, chemical toxicity, oxidative stress and hot, cold or freezing temperatures. The abiotic stress may be an osmotic stress caused by a water stress (particularly due to drought), salt stress, oxidative stress or an ionic stress. Biotic stresses are typically those stresses caused by pathogens, such as bacteria, viruses, fungi and insects.

[0468] In particular, the methods of the present invention may be performed under non-stress conditions or under conditions of mild drought to give plants having increased yield relative to control plants. As reported in Wang et al. (Planta (2003) 218: 1-14), abiotic stress leads to a series of morphological, physiological, biochemical and molecular changes that adversely affect plant growth and productivity. Drought, salinity, extreme temperatures and oxidative stress are known to be interconnected and may induce growth and cellular damage through similar mechanisms. Rabbani et al. (Plant Physiol (2003) 133: 1755-1767) describes a particularly high degree of “cross talk” between drought stress and high-salinity stress. For example, drought and/or salinisation are manifested primarily as osmotic stress, resulting in the disruption of homeostasis and ion distribution in the cell. Oxidative stress, which frequently accompanies high or low temperature, salinity or drought stress, may cause denaturing of functional and structural proteins. As a consequence, these diverse environmental stresses often activate similar cell signalling pathways and cellular responses, such as the production of stress proteins, up-regulation of anti-oxidants, accumulation of compatible solutes and growth arrest. The term “non-stress” conditions as used herein are those environmental conditions that allow optimal growth of plants. Persons skilled in the art are aware of normal soil conditions and climatic conditions for a given location.

[0469] Performance of the methods of the invention gives plants grown under non-stress conditions or under mild drought conditions increased yield relative to control plants grown under comparable conditions. Therefore, according to the present invention, there is provided a method for increasing yield in plants grown under non-stress conditions or under mild drought conditions, which method comprises increasing expression in a plant of a nucleic acid encoding a GLK polypeptide.

[0470] Performance of the methods of the invention gives plants grown under conditions of nutrient deficiency, particularly under conditions of nitrogen deficiency, increased yield relative to control plants grown under comparable conditions. Therefore, according to the present invention, there is provided a method for increasing yield in plants grown under conditions of nutrient deficiency, which method comprises increasing expression in a plant of a nucleic acid encoding a GLK polypeptide. Nutrient deficiency may result from a lack of nutrients such as nitrogen, phosphates and other phosphorous-containing compounds, potassium, calcium, cadmium, magnesium, manganese, iron and boron, amongst others.

[0471] The methods of the invention are advantageously applicable to any plant. Plants that are particularly useful in the methods of the invention include all plants which belong to the superfamily Viridiplantae, in particular monocotyledonous and dicotyledonous plants including fodder or forage legumes, ornamental plants, food crops, trees or shrubs. According to a preferred embodiment of the present invention, the plant is a crop plant. Examples of crop plants include soybean, sunflower, canola, alfalfa, rapeseed, cotton, tomato, potato and tobacco. Further preferably, the plant is a monocotyledonous plant. Examples of monocotyledonous plants include sugarcane. More preferably the plant is a cereal. Examples of cereals include rice, maize, wheat, barley, millet, rye, triticale, sorghum and oats.

[0472] The present invention also encompasses plants obtainable by the methods according to the present invention. The present invention therefore provides plants, plant parts or plant cells thereof obtainable by the method according to the present invention, which plants or parts or cells thereof comprise a nucleic acid transgene encoding a GLK protein as defined above.

[0473] The present invention also encompasses use of nucleic acids encoding GLK proteins and use of GLK polypeptides in altering yield-related traits.

[0474] Nucleic acids encoding GLK polypeptides, or GLK proteins themselves, may find use in breeding programmes in which a DNA marker is identified which may be genetically linked to a GLK protein-encoding gene. The nucleic acids/genes, or the GLK proteins themselves may be used to define a molecular marker. This DNA or protein marker may then be used in breeding programmes to select plants having increased yield as defined hereinabove in the methods of the invention.

[0475] Allelic variants of a GLK protein-encoding acid/gene may also find use in marker-assisted breeding programmes. Such breeding programmes sometimes require introduction of allelic variation by mutagenic treatment of the plants, using for example EMS mutagenesis; alternatively, the programme may start with a collection of allelic variants of so called “natural” origin caused unintentionally. Identification of allelic variants then takes place, for example, by PCR. This is followed by a step for selection of superior allelic variants of the sequence in question and which give increased yield. Selection is typically carried out by monitoring growth performance of plants containing different allelic variants of the sequence in question. Growth performance may be monitored in a greenhouse or in the field. Further optional steps include crossing plants in which the superior allelic variant was identified with another plant. This could be used, for example, to make a combination of interesting phenotypic features.

[0476] A nucleic acid encoding a GLK protein may also be used as probes for genetically and physically mapping the genes that they are a part of, and as markers for traits linked to those genes. Such information may be useful in plant breeding in order to develop lines with desired phenotypes. Such use of GLK encoding nucleic acids requires only a nucleic acid sequence of at least 15 nucleotides in length. The GLK encoding nucleic acids may be used as restriction fragment length polymorphism (RFLP) markers. Southern blots (Sambrook J, Fritsch EF and Maniatis T (1989) Molecular Cloning, A Laboratory Manual) of restriction-digested plant genomic DNA may be probed with the GLK encoding nucleic acids. The resulting banding patterns may then be subjected to genetic analyses using computer programs such as MapMaker (Lander et al. (1987) Genomics 1: 174-181) in order to construct a genetic map. In addition, the nucleic acids may be used to probe Southern blots containing restriction endonuclease-treated genomic DNAs of a set of individuals representing parent and progeny of a defined genetic cross. Segregation of the DNA polymorphisms is noted and used to calculate the position of the GLK encoding nucleic acid in the genetic map previously obtained using this population (Botstein et al. (1980) Am. J. Hum. Genet. 32:314-331).

[0477] The production and use of plant gene-derived probes for use in genetic mapping is described in Bernatzky and Tanksley (Plant Mol. Biol. Reporter 4: 37-41, 1986). Numerous publications describe genetic mapping of specific cDNA clones using the methodology outlined above or variations thereof. For example, F2 intercross populations, backcross populations, randomly mated populations, near isogenic lines, and other sets of individuals may be used for mapping. Such methodologies are well known to those skilled in the art.

[0478] The nucleic acid probes may also be used for physical mapping (i.e., placement of sequences on physical maps; see Hoheisel et al. In: Non-mammalian Genomic Analysis: A Practical Guide, Academic press 1996, pp. 319-346, and references cited therein).

[0479] In another embodiment, the nucleic acid probes may be used in direct fluorescence in situ hybridisation (FISH) mapping (Trask (1991) Trends Genet. 7:149-154). Although current methods of FISH mapping favour use of large clones (several kb to several hundred kb; see Laan et al. (1995) Genome Res. 5:13-20), improvements in sensitivity may allow performance of FISH mapping using shorter probes.

[0480] A variety of nucleic acid amplification-based methods for genetic and physical mapping may be carried out using the nucleic acids. Examples include allele-specific amplification (Kazazian (1989) J. Lab. Clin. Med. 11:95-96), polymorphism of PCR-amplified fragments (CAPS; Sheffield et al. (1993) Genomics 16:325-332), allele-specific ligation (Landegren et al. (1988) Science 241:1077-1080), nucleotide extension reactions (Sokolov (1990) Nucleic Acid Res. 18:3671), Radiation Hybrid Mapping (Walter et al. (1997) Nat. Genet. 7:22-28) and Happy Mapping (Dear and Cook (1989) Nucleic Acid Res. 17:6795-6807). For these methods, the sequence of a nucleic acid is used to design and produce primer pairs for use in the amplification reaction or in primer extension reactions. The design of such primers is well known to those skilled in the art. In methods employing PCR-based genetic mapping, it may be necessary to identify DNA sequence differences between the parents of the mapping cross in the region corresponding to the instant nucleic acid sequence. This, however, is generally not necessary for mapping methods.

[0481] The methods according to the present invention result in plants having altered yield-related traits, as described hereinbefore. These traits may also be combined with other economically advantageous traits, such as further yield-enhancing traits, tolerance to other abiotic and biotic stresses, traits modifying various architectural features and/or biochemical and/or physiological features.

### REV DHDZip/START

[0482] It has now surprisingly been found that reducing the expression in a plant of an endogenous REV gene using a REV delta homeodomain leucine zipper domain (HDZip)/STeroidogenic Acute Regulatory (STAR) related lipid Transfer domain (START) nucleic acid sequence gives plants having increased yield relative to control plants. The present invention therefore provides methods for increasing yield in plants relative to control plants, by reducing the expression in a plant of an endogenous REV gene using a REV ΔHDZip/START nucleic acid sequence.

[0483] Advantageously, performance of the methods according to the present invention results in plants having enhanced yield related traits, particularly increased yield, more particularly increased seed yield and/or increased biomass, relative to control plants. The terms “yield” and “seed yield” are described in more detail in the “definitions” section herein. Increased biomass may manifest itself as increased root biomass. Increased root biomass may be due to increased number of roots, increased root thickness and/or increased root length.

[0484] The term “increased yield” also refers to an increase in biomass (weight) of one or more parts of a plant, which may include aboveground (harvestable) parts and/or (harvestable) parts below ground. Such harvestable parts include vegetative biomass and/or seeds, and performance of the methods of the invention results in plants having increased yield (in vegetative biomass and/or seed) relative to the yield of control plants.

[0485] Therefore, according to the present invention, there is provided a method for increasing seed yield and/or plant biomass, which method comprises reducing the expression in a plant of an endogenous REV gene using a REV ΔHDZip/START nucleic acid sequence.

[0486] In particular, the increased seed yield is selected from one or more of the following: (i) increased seed weight; (ii) increased number of filled seeds; (iii) increased seed fill rate; (iv) increased harvest index; and (v) increased individual seed length.

[0487] Taking corn as an example, a yield increase may be manifested as one or more of the following: increase in the number of plants established per hectare or acre, an increase in the number of ears per plant, an increase in the number of rows, number of kernels per row, kernel weight, thousand kernel weight, ear length/diameter, increase in the seed filling rate (which is the number of filled seeds divided by the total number of seeds and multiplied by 100), among others. Taking rice as an example, a yield increase may manifest itself as an increase in one or more of the following: number of plants per hectare or acre, number of panicles per plant, number of spikelets per panicle, number of flowers (florets) per panicle (which is expressed as a ratio of the number of filled seeds over the number of primary panicles), increase in the seed filling rate (which is the number of filled seeds divided by the total number of seeds and multiplied by 100), increase in thousand kernel weight, among others.

[0488] The present invention provides a method for increasing yield, especially seed yield of plants, relative to control plants, which method comprises modulating expression, preferably increasing expression, in a plant of a nucleic acid encoding a REV ΔHDZip/START polypeptide as defined herein.

[0489] Since the transgenic plants according to the present invention have increased yield, it is likely that these plants exhibit an increased growth rate (during at least part of their life cycle), relative to the growth rate of control plants at a corresponding stage in their life cycle.

[0490] The increased growth rate may be specific to one or more parts of a plant (including seeds), or may be throughout substantially the whole plant. Plants having an increased growth rate may have a shorter life cycle. The life cycle of a plant may be taken to mean the time needed to grow from a dry mature seed up to the stage where the plant has produced dry mature seeds, similar to the starting material. This life cycle may be influenced by factors such as early vigour, growth rate, greenness index, flowering time and speed of seed maturation. The increase in growth rate may take place at one or more stages in the life cycle of a plant or during substantially the whole plant life cycle. Increased growth rate during the early stages in the life cycle of a plant may reflect enhanced vigour. The increase in growth rate may alter the harvest cycle of a plant allowing plants to be sown later and/or harvested sooner than would otherwise be possible (a similar effect may be obtained with earlier flowering time). If the growth rate is sufficiently increased, it may allow for the further sowing of seeds of the same plant species (for example sowing and harvesting of rice plants followed by sowing and harvesting of further rice plants all within one conventional growing period). Similarly, if the growth rate is sufficiently increased, it may allow for the further sowing of seeds of different plants species (for example the sowing and harvesting of corn plants followed by, for example, the sowing and optional harvesting of soybean, potato or any other suitable plant). Harvesting additional times from the same rootstock in the case of some crop plants may also be possible. Altering the harvest cycle of a plant may lead to an increase in annual biomass production per acre (due to an increase in the number of times (say in a year) that any particular plant may be grown and harvested). An increase in growth rate may also allow for the cultivation of transgenic plants in a wider geographical area than their wild-type counterparts, since the territorial limitations for growing a crop are often determined by adverse environmental conditions either at the time of planting (early season) or at the time of harvesting (late season). Such adverse conditions may be avoided if the harvest cycle is shortened. The growth rate may be determined by deriving various parameters from growth curves, such parameters may be: T-Mid (the time taken for plants to reach 50% of their maximal size) and T-90 (time taken for plants to reach 90% of their maximal size), amongst others.

[0491] According to a preferred feature of the present invention, performance of the methods of the invention gives plants having an increased growth rate relative to control plants. Therefore, according to the present invention, there is provided a method for increasing the growth rate of plants, which method comprises modulating expression, preferably increasing expression, in a plant of a nucleic acid encoding a REV ΔHDZip/START polypeptide as defined herein.

[0492] An increase in yield and/or growth rate occurs whether the plant is under non-stress conditions or whether the plant is exposed to various stresses compared to control plants. Plants typically respond to exposure to stress by growing more slowly. In conditions of severe stress, the plant may even stop growing altogether. Mild stress on the other hand is defined herein as being any stress to which a plant is exposed which does not result in the plant ceasing to grow altogether without the capacity to resume growth. Mild stress in the sense of the invention leads to a reduction in the growth of the stressed plants of less than 40%, 35% or 30%, preferably less than 25%, 20% or 15%, more preferably less than 14%, 13%, 12%, 11% or 10% or less in comparison to the control plant under non-stress conditions. Due to advances in agricultural practices (irrigation, fertilization, pesticide treatments) severe stresses are not often encountered in cultivated crop plants. As a consequence, the compromised growth induced by mild stress is often an undesirable feature for agriculture. Mild stresses are the everyday biotic and/or abiotic (environmental) stresses to which a plant is exposed. Abiotic stresses may be due to drought or excess water, anaerobic stress, salt stress, chemical toxicity, oxidative stress and hot, cold or freezing temperatures. The abiotic stress may be an osmotic stress caused by a water stress (particularly due to drought), salt stress, oxidative stress or an ionic stress. Biotic stresses are typically those stresses caused by pathogens, such as bacteria, viruses, fungi and insects.

[0493] In particular, the methods of the present invention may be performed under non-stress conditions or under conditions of mild drought to give plants having increased yield relative to control plants. As reported in Wang et al. (Planta (2003) 218: 1-14), abiotic stress leads to a series of morphological, physiological, biochemical and molecular changes that adversely affect plant growth and productivity. Drought, salinity, extreme temperatures and oxidative stress are known to be interconnected and may induce growth and cellular damage through similar mechanisms. Rabbani et al. (Plant Physiol (2003) 133: 1755-1767) describes a particularly high degree of “cross talk” between drought stress and high-salinity stress. For example, drought and/or salinisation are manifested primarily as osmotic stress, resulting in the disruption of homeostasis and ion distribution in the cell. Oxidative stress, which frequently accompanies high or low temperature, salinity or drought stress, may cause denaturing of functional and structural proteins. As a consequence, these diverse environmental stresses often activate similar cell signalling pathways and cellular responses, such as the production of stress proteins, up-regulation of anti-oxidants, accumulation of compatible solutes and growth arrest. The term “non-stress” conditions as used herein are those environmental conditions that allow optimal growth of plants. Persons skilled in the art are aware of normal soil conditions and climatic conditions for a given location.

[0494] Performance of the methods of the invention gives plants grown under non-stress conditions or under mild drought conditions increased yield relative to control plants grown under comparable conditions. Therefore, according to the present invention, there is provided a method for increasing yield in plants grown under non-stress conditions or under mild drought conditions, which method comprises increasing expression in a plant of a nucleic acid encoding a REV ΔHDZip/START polypeptide.

[0495] Performance of the methods of the invention gives plants grown under conditions of nutrient deficiency, particularly under conditions of nitrogen deficiency, increased yield relative to control plants grown under comparable conditions. Therefore, according to the present invention, there is provided a method for increasing yield in plants grown under conditions of nutrient deficiency, which method comprises increasing expression in a plant of a nucleic acid encoding a REV ΔHDZip/START polypeptide. Nutrient deficiency may result from a lack of nutrients such as nitrogen, phosphates and other phosphorous-containing compounds, potassium, calcium, cadmium, magnesium, manganese, iron and boron, amongst others.

[0496] Reference herein to an “endogenous” REV gene not only refers to a REV gene as found in a plant in its natural form (i.e., without there being any human intervention), but also refers to isolated REV nucleic acid sequences subsequently introduced into a plant. For example, a transgenic plant containing a REV transgene may encounter a substantial reduction of the transgene expression and/or substantial reduction of expression of an endogenous REV gene, according to the methods of the invention.

[0497] The term “expression” or “gene expression” means the transcription of a specific gene or specific genes or specific genetic construct. The term “expression” or “gene expression” in particular means the transcription of a gene or genes or genetic construct into structural RNA (rRNA, tRNA) or mRNA with or without subsequent translation of the latter into a protein. The process includes transcription of DNA and processing of the resulting mRNA product.

[0498] “Reduction” or “decrease” of expression are used interchangeably herein, and refer, for the methods of the present invention, to a diminution, but not the elimination, of endogenous REV gene expression and/or REV polypeptide levels and/or REV polypeptide activity, using a REV ΔHDZip/START nucleic acid sequence, relative respectively to REV gene expression and/or REV polypeptide level and/or REV polypeptide activity found in control plants. The reduction of REV gene expression and/or REV polypeptide level and/or REV polypeptide activity is taken to mean in the sense of the application at least 10%, 20%, 30%, 40% or 50%, preferably at least 60%, 70 or 80%, more preferably 85%, 90%, or 95% less REV gene expression and/or REV polypeptide level and/or REV polypeptide activity in comparison to a control plant as defined herein. Preferably, reducing the expression of the endogenous REV gene using a REV ΔHDZip/START nucleic acid sequence leads to the appearance of one or more phenotypic traits.

[0499] This reduction of endogenous REV gene expression may be achieved by using any one or more of several well-known “gene silencing” methods (see definitions section for more details). The term “silencing” of a gene as used herein refers to the reduction, but not the elimination, of endogenous REV gene expression.

[0500] A preferred method for reducing expression in a plant of an endogenous REV gene via RNA-mediated silencing is by using an inverted repeat of a REV ΔHDZip/START nucleic acid sequence, preferably capable of forming a hairpin structure. The inverted repeat is cloned into an expression vector comprising control sequences. A non-coding DNA nucleic acid sequence (a spacer, for example a matrix attachment region fragment (MAR), an intron, a polylinker, etc.) is located between the two inverted REV ΔHDZip/START nucleic acid sequences forming the inverted repeat. After transcription of the inverted repeat, a chimeric RNA with a self-complementary structure is formed (partial or complete). This double-stranded RNA structure is referred to as the hairpin RNA (hpRNA). The hpRNA is processed by the plant into siRNAs that are incorporated into a RISC. The RISC further cleaves the mRNA transcripts encoding a REV polypeptide, thereby reducing the number of mRNA transcripts to be translated into a REV polypeptide. See for example, Grierson et al. (1998) WO 98/53083; Waterhouse et al. (1999) WO 99/53050).

[0501] The expression of an endogenous REV gene may also be reduced by introducing a genetic modification, within the locus of a REV gene or elsewhere in the genome. The locus of a gene as defined herein is taken to mean a genomic region, which includes the gene of interest and 10 kb up- or down stream of the coding region.

[0502] The genetic modification may be introduced, for example, by any one (or more) of the following methods: T-DNA tagging, TILLING, site-directed mutagenesis, directed evolution, homologous recombination. Following introduction of the genetic modification, there follows a step of selecting for reduced expression of an endogenous REV gene, which reduction in expression gives plants having increased yield compared to control plants.

[0503] T-DNA tagging involves insertion of a T-DNA, in the genomic region of the gene of interest or 10 kb up- or downstream of the coding region of a gene in a configuration such that the T-DNA reduces (but does not eliminate) the expression of the targeted gene.

[0504] Homologous recombination allows introduction in a genome of a selected nucleic acid at a defined selected position. Alternatively, a screening program may be set up to identify in a plant population natural variants of a REV gene which variants encode REV polypeptides with reduced activity. Such natural variants may also be used for example, to perform homologous recombination.

[0505] T-DNA tagging, TILLING, site-directed mutagenesis and directed evolution are examples of technologies that enable the generation of novel alleles and variants of REV nucleic acid sequences which variants encode REV polypeptides with reduced activity.

[0506] Other methods, such as the use of antibodies directed to an endogenous REV polypeptide for inhibiting its function in planta, or interference in the signalling pathway in which a REV polypeptide is involved, will be well known to the skilled man.

[0507] For optimal performance, the RNA-mediated silencing techniques used for reducing expression in a plant of an endogenous REV gene using a REV ΔHDZip/START nucleic acid sequence, requires the use of nucleic acid sequences from monocotyledonous plants for transformation of monocotyledonous plants, and from dicotyledonous plants for transformation of dicotyledonous plants. Preferably, a REV ΔHDZip/START nucleic acid sequence from any given plant species is introduced into that same species. For example, a REV ΔHDZip/START nucleic acid sequence from rice is transformed into a rice plant. The REV ΔHDZip/START nucleic acid sequence need not be introduced into the same plant variety.

[0508] Reference herein to a “nucleic acid sequence” is taken to mean a polymeric form of a deoxyribonucleotide or a ribonucleotide polymer of any length, either double- or single-stranded, or analogues thereof, that has the essential characteristic of a natural ribonucleotide in that it can hybridise to nucleic acid sequences in a manner similar to naturally occurring polynucleotides.

[0509] Reference herein to a “REV ΔHDZip/START” nucleic acid sequence is taken to mean a sufficient length of substantially contiguous nucleotides from a REV nucleic acid sequence substantially excluding the part encoding the HDZip and START domains. In order to perform gene silencing, this may be as little as 20 or fewer nucleotides, alternatively this may be as much as the REV ΔHDZip/START nucleic acid sequence (including the 5′ and/or 3′ UTR, either in part or in whole. A person skilled in the art would be aware that a sufficient length of substantially contiguous nucleotides from the REV nucleic acid sequence encoding the HDZip and START domains is to be excluded in performing the methods of the invention. This may be as little as 10, 11, 12, 13, 14, 15, 16, 17, 18, 19, 20 or more nucleotides. This may be as much as the complete nucleic acid sequence encoding the HDZip and START domains. By nucleic acid sequence “encoding the HDZip and START domains” is meant herein the region of the nucleic acid sequence comprising codons that are translated into amino acid residues of the HDZip and START domains (which domains do not need to be complete and/or functional). A person skilled in the art would be aware that substantially contiguous nucleotides from a REV nucleic acid sequence may overlap HDZip and START domain boundaries by a few nucleotides, typically by not more than 20 nucleotides. Also excluded in performing the methods of the invention are nucleic acid sequences that would simultaneously reduce expression of at least one other endogenous gene, regardless whether the other endogenous gene encodes for a polypeptide comprising an HDZip and START domain or not. A nucleic acid sequence encoding a (functional) polypeptide is not a requirement for the various methods discussed above for the substantial reduction of expression of an endogenous REV gene.

[0510] REV genes are well known in the art (described recently in Floyd et al. ((2006) Genetics 173: 373-388) and useful in the methods of the invention are REV ΔHDZip/START nucleic acid sequences.

[0511] Other REV ΔHDZip/START nucleic acid sequences may also be used in the methods of the invention, and may readily be identified by a person skilled in the art. REV polypeptides may be identified by the presence of one or more of several well-known features (see below). Upon identification of a REV polypeptide, a person skilled in the art could easily derive, using routine techniques, the corresponding encoding REV ΔHDZip/START nucleic acid sequence, and use a sufficient length of contiguous nucleotides of the same to perform any one or more of the gene silencing methods described above.

[0512] The term “REV polypeptide” as defined herein refers to a polypeptide that falls into the class III of the HDZip polypeptides as delineated by Sessa et al. ((1994) In: Puigdomene P, Coruzzi G (ed), Springer, Berlin Heidelberg New York, pp 411-426). REV polypeptides comprise from N-terminus to C-terminus: (i) a homeodomain (HD) domain, for DNA binding; (ii) a leucine zipper, for protein-protein interaction; (iii) a START domain for lipid/sterol binding, and (iv) a C-terminal region (CTR), of undefined function.

[0513] REV polypeptides may readily be identified using routine techniques well known in the art, such as by sequence alignment. Methods for the alignment of sequences for comparison are well known in the art, such methods include GAP, BESTFIT, BLAST, FASTA and TFASTA. GAP uses the algorithm of Needleman and Wunsch ((1970) J Mol Biol 48: 443-453) to find the alignment of two complete sequences that maximizes the number of matches and minimizes the number of gaps. The BLAST algorithm (Altschul et al. (1990) J Mol Biol 215: 403-10) calculates percent sequence identity and performs a statistical analysis of the similarity between the two sequences. The software for performing BLAST analysis is publicly available through the National Centre for Biotechnology Information. REV polypeptides comprising a homeodomain, a leucine zipper, a START domain and a CTR may readily be identified using, for example, the ClustalW multiple sequence alignment algorithm (version 1.83), with the default pairwise alignment parameters, and a scoring method in percentage. Minor manual editing may be performed to optimise the alignment, as would be apparent to a person skilled in the art. A phylogenetic tree, which is an estimate of phylogeny (or common ancestry), may be constructed using the Neighbour-Joining tree building algorithm (at EBI), to help visualize clustering of related genes and to identify orthologues and paralogues. REV polypeptides as defined herein refers to any polypeptide which, when used in the construction of a class III HDZip polypeptide phylogenetic tree, such as the one depicted in FIGS. 15 and 16, falls into the REV clade (comprising REV, PHB and PHV) and not the CORONA clade (comprising ATHb8 and CNA), and more specifically, which falls into the REV branch (and not the PHB/PHV branch). Upon identification of a REV polypeptide (falling into the REV branch), a person skilled in the art could easily derive, using routine techniques, the corresponding encoding REV ΔHDZip/START nucleic acid sequence and use a sufficient length of contiguous nucleotides of the same to perform any one or more of the gene silencing methods described above.

[0514] Orthologues and paralogues may easily be found by performing a so-called reciprocal blast search. This may be done by a first BLAST involving BLASTing a query sequence (for example, SEQ ID NO: 198 or SEQ ID NO: 199) against any sequence database, such as the publicly available NCBI database. BLASTN or TBLASTX (using standard default values) may be used when starting from a nucleotide sequence and BLASTP or TBLASTN (using standard default values) may be used when starting from a polypeptide sequence. The BLAST results may optionally be filtered. The full-length sequences of either the filtered results or non-filtered results are then BLASTed back (second BLAST) against sequences from the organism from which the query sequence is derived (where the query sequence is SEQ ID NO: 198 or SEQ ID NO: 199, the second BLAST would therefore be against rice sequences). High-ranking hits are those having a low E-value. In addition to E-values, comparisons are also scored by percentage identity. Percentage identity refers to the number of identical nucleotides (or amino acids) between the two compared nucleic acid (or polypeptide) sequences over a particular length. An example detailing the identification of orthologues and paralogues is given in Example 27. All REV polypeptides comprise a CTR having, in increasing order of preference, at least 50%, 55%, 60%, 65%, 70%, 75%, 80%, 85%, 90%, 95% or 98% sequence identity to the CTR of a REV polypeptide as represented by SEQ ID NO: 197. Preferably, the CTR of a REV polypeptide is as represented by SEQ ID NO: 197. More preferably, SEQ ID NO: 194 encoding a part of the CTR of a REV polypeptide is used in performing the methods according the invention. In FIG. 16, the REV polypeptide paralogues and orthologues cluster together.

[0515] The terms “domain” and “motif” are defined above. The term “region” as defined herein refers to the amino acid sequence starting at the end of the START domain and ending at the stop codon of the REV polypeptide.

[0516] Special databases exist for the identification of domains. The HD and the START domains in a REV polypeptide may be identified using, for example, SMART, InterPro, Prosite, or Pfam. The HD comprises about 60 residues, the START domain about 210 residues. In the InterPro database, the HD is designated by IPR001356, PF00046 in the Pfam database and PS50071 in the PROSITE database. In the InterPro database, the START domain is designated by IPR002913, PF01852 in the Pfam database and PS50848 in the PROSITE database. For example in SEQ ID NO: 199, the HD Pfam entry spans from amino acids 27 to 87, and the START domain Pfam entry from 163 to 376. The CTR therefore begins at amino acid 377 and ends at the stop codon (at 840). Leucine zipper prediction and heptad identification may be done using specialised software such as 2ZIP, which combines a standard coiled coil prediction algorithm with an approximate search for the characteristic leucine repeat (Bornberg-Bauer et al. (1998) Computational Approaches to Identify Leucine Zippers, Nucleic Acids Res., 26(11): 2740-2746), hosted on a server at Max Planck Institute for Molecular Genetics in Berlin. For example, the leucine zipper of SEQ ID NO: 199 comprises five leucine repeats (heptads), and spans amino acids 91 to 127.

[0517] Furthermore, a REV polypeptide may also be identifiable by its ability to bind DNA and to interact with other proteins. DNA-binding activity and protein-protein interactions may readily be determined in vitro or in vivo using techniques well known in the art. Examples of in vitro assays for DNA binding activity include: gel retardation analysis using the HD DNA binding domain (West et al. (1998) Nucl Acid Res 26(23): 5277-87), or yeast one-hybrid assays. An example of an in vivo assay for protein-protein interactions is the yeast two-hybrid analysis (Fields and Song (1989) Nature 340:245-6).

[0518] Therefore upon identification of a REV polypeptide using one or several of the features described above, a person skilled in the art may easily derive the corresponding REV ΔHDZip/START nucleic acid sequence and use a sufficient length of substantially contiguous nucleotides of the same to perform any one or more of the gene silencing methods described above (for the substantial reduction of an endogenous REV gene expression).

[0519] Preferred for use in the methods of the invention is a nucleic acid sequence as represented by SEQ ID: 194, encoding part of the CTR of an Oryza sativa REV polypeptide, or SEQ ID NO: 196, encoding the CTR of the same Oryza sativa REV polypeptide. REV ΔHDZip/START nucleic acid sequences are comprised in the nucleic acid sequences encoding REV polypeptide orthologues or paralogues. An example of a REV polypeptide paralogue to SEQ ID NO: 199 is represented by SEQ ID NO: 201, Oryza sativa Orysa_HOX10 (encoded by SEQ ID NO: 200, NCBI accession number AY425991.1). Examples of REV polypeptide orthologues are represented by SEQ ID NO: 203 Arabidopsis thaliana Arath_REV (encoded by SEQ ID NO: 202, NCBI accession number AF188994), SEQ ID NO: 205 Zea mays Zeama_HDIII RLD1 (rolled leaf1; encoded by SEQ ID NO: 204, NCBI accession number AY501430.1), SEQ ID NO: 207 Populus trichocarpa Poptr_HDIII (encoded by SEQ ID NO: 206, NCBI accession number AY919617), SEQ ID NO: 209 Medicago trunculata Medtr_HDIII (encoded by SEQ ID NO: 208, NCBI accession number AC138171.17), SEQ ID NO: 211 Saccharum officinarum Sacof_HDIlipartial (encoded by SEQ ID NO: 210, contig of NCBI accession numbers CA125167.1 CA217027.1 CA241276.1 CA124509.1), SEQ ID NO: 213 Triticum aestivum Triae_HDIII (partial; encoded by SEQ ID NO: 212, contig of NCBI accession numbers CD905903 BM135681.1 BQ578798.1 CJ565259.1), SEQ ID NO: 215 Hordeum vulgare Horvu_HDIII (partial, encoded by SEQ ID NO: 214, contig of NCBI accession numbers BU996988.1 BJ452342.1 BJ459891.1), and SEQ ID NO: 217 Phyllostachys praecox PhyprHDIII (partial; encoded by SEQ ID NO: 216, NCBI accession number DQ013803). In example 27 (and table Z) of the present application is described a method to identify nucleic acid sequences useful in performing the methods of the invention.

[0520] The source of the REV ΔHDZip/START nucleic acid sequence useful in performing the methods of the invention may be any plant source or artificial source. For optimal performance, the gene silencing techniques used for the reduction of an endogenous REV gene expression requires the use of REV ΔHDZip/START nucleic acid sequences from monocotyledonous plants for transformation of monocotyledonous plants, and use of REV ΔHDZip/START nucleic acid sequences from dicotyledonous plants for transformation of dicotyledonous plants. Preferably, REV ΔHDZip/START nucleic acid sequences from plants of the family Poaceae are transformed into plants of the family Poaceae. Further preferably, a REV ΔHDZip/START nucleic acid sequence from rice is transformed into a rice plant. The REV ΔHDZip/START nucleic acid sequence need not be introduced into the same plant variety. Most preferably, the REV ΔHDZip/START from rice is a sufficient length of substantially contiguous nucleotides of SEQ ID NO: 194 or SEQ ID NO: 196, or a sufficient length of substantially contiguous nucleotides of a REV ΔHDZip/START nucleic acid sequence from nucleic acid sequences encoding REV polypeptide orthologues or paralogues. As mentioned above, a person skilled in the art would be well aware of what would constitute a sufficient length of substantially contiguous nucleotides to perform any of the gene silencing methods defined hereinabove, this may be as little as 20 or fewer substantially contiguous nucleotides in some cases.

[0521] The invention also provides genetic constructs and vectors to facilitate introduction and/or expression of the nucleotide sequences useful in the methods according to the invention.

[0522] Therefore, there is provided a genetic construct for reduced expression in a plant of an endogenous REV gene comprising one or more control sequences, a REV ΔHDZip/START nucleic acid sequence, and optionally a transcription termination sequence. Preferably, the control sequence is a constitutive promoter.

[0523] A preferred construct for reducing expression in a plant of an endogenous REV gene is one comprising an inverted repeat of a REV ΔHDZip/START nucleic acid sequence, preferably capable of forming a hairpin structure, which inverted repeat is under the control of a constitutive promoter.

[0524] Constructs useful in the methods according to the present invention may be created using recombinant DNA technology well known to persons skilled in the art. The genetic constructs may be inserted into vectors, which may be commercially available, suitable for transforming into plants and suitable for expression of the gene of interest in the transformed cells. The invention therefore provides use of a genetic construct as defined hereinabove in the methods of the invention.

[0525] The sequence of interest is operably linked to one or more control sequences (at least to a promoter) capable of increasing expression in a plant. Advantageously, any type of promoter may be used to drive expression of the nucleic acid sequence.

[0526] In one embodiment, the REV ΔHDZip/START nucleic acid sequence is operably linked to a constitutive promoter. Preferably the promoter is a ubiquitous promoter and is expressed predominantly throughout the plant. Preferably, the constitutive promoter is substantially as represented by SEQ ID NO: 218 or SEQ ID NO: 58, further preferably the promoter capable of preferentially expressing the nucleic acid sequence throughout the plant is a GOS2 promoter, most preferably the GOS2 promoter is from rice (SEQ ID NO: 218 or SEQ ID NO: 58). It should be clear that the applicability of the present invention is not restricted to the REV ΔHDZip/START nucleic acid as represented by SEQ ID NO: 194, nor is the applicability of the invention restricted to expression of a REV ΔHDZip/START nucleic acid sequence when driven by a GOS2 promoter. An alternative constitutive promoter that is useful in the methods of the present invention is the high mobility group protein promoter (SEQ ID NO: 293, PRO0170). Examples of other constitutive promoters that may also be used to drive expression of a REV ΔHDZip/START nucleic acid sequence are shown in the definitions section.

[0527] Optionally, one or more terminator sequences may also be used in the construct introduced into a plant.

[0528] The genetic constructs of the invention may further include an origin of replication sequence that is required for maintenance and/or replication in a specific cell type. One example is when a genetic construct is required to be maintained in a bacterial cell as an episomal genetic element (e.g. plasmid or cosmid molecule). Preferred origins of replication include, but are not limited to, the f1-ori and colE1.

[0529] For the detection of the successful transfer of the nucleic acid sequences as used in the methods of the invention and/or selection of transgenic plants comprising these nucleic acids, it is advantageous to use marker genes (or reporter genes). Therefore, the genetic construct may optionally comprise a selectable marker gene. Selectable markers are described in more detail in the “definitions” section herein. The marker genes may be removed or excised from the transgenic cell once they are no longer needed. Techniques for marker removal are known in the art, useful techniques are described above in the definitions section.

[0530] The present invention also encompasses plants including plant parts and plant cells obtainable by the methods according to the present invention having reduced expression of an endogenous REV gene using a REV ΔHDZip/START nucleic acid sequence and which have increased yield relative to control plants.

[0531] The invention also provides a method for the production of transgenic plants having increased yield relative to control plants, which transgenic plants have reduced expression of an endogenous REV gene using a REV ΔHDZip/START nucleic acid sequence.

[0532] More specifically, the present invention provides a method for the production of transgenic plants having increased yield relative to control plants, which method comprises:
[0533] (i) introducing and expressing in a plant, plant part or plant cell a genetic construct comprising one or more control sequences for reducing expression in a plant of an endogenous REV gene using a REV ΔHDZip/START nucleic acid sequence; and
[0534] (ii) cultivating the plant, plant part or plant cell under conditions promoting plant growth and development.

[0535] Preferably, the construct introduced into a plant is one comprising an inverted repeat (in part or complete) of a REV ΔHDZip/START nucleic acid sequence, preferably capable of forming a hairpin structure, which inverted repeat is under the control of a constitutive promoter.

[0536] The nucleic acid may be introduced directly into a plant cell or into the plant itself (including introduction into a tissue, organ or any other part of a plant). According to a preferred feature of the present invention, the construct is introduced into a plant by transformation.

[0537] The genetically modified plant cells can be regenerated via all methods with which the skilled worker is familiar. Suitable methods can be found in the abovementioned publications by S. D. Kung and R. Wu, Potrykus or Höfgen and Willmitzer.

[0538] Generally after transformation, plant cells or cell groupings are selected for the presence of one or more markers which are encoded by plant-expressible genes co-transferred with the gene of interest, following which the transformed material is regenerated into a whole plant. To select transformed plants, the plant material obtained in the transformation is, as a rule, subjected to selective conditions so that transformed plants can be distinguished from untransformed plants. For example, the seeds obtained in the above-described manner can be planted and, after an initial growing period, subjected to a suitable selection by spraying. A further possibility consists in growing the seeds, if appropriate after sterilization, on agar plates using a suitable selection agent so that only the transformed seeds can grow into plants. Alternatively, the transformed plants are screened for the presence of a selectable marker such as the ones described above.

[0539] Following DNA transfer and regeneration, putatively transformed plants may be evaluated, for instance using Southern analysis, for the presence of the gene of interest, copy number and/or genomic organisation. Alternatively or additionally, expression levels of the newly introduced DNA may be monitored using Northern and/or Western analysis, or quantitative PCR, all techniques being well known to persons having ordinary skill in the art.

[0540] The generated transformed plants may be propagated by a variety of means, such as by clonal propagation or classical breeding techniques. For example, a first generation (or T1) transformed plant may be selfed to give homozygous second generation (or T2) transformants, and the T2 plants further propagated through classical breeding techniques.

[0541] The generated transformed organisms may take a variety of forms. For example, they may be chimeras of transformed cells and non-transformed cells; clonal transformants (e.g., all cells transformed to contain the expression cassette); grafts of transformed and untransformed tissues (e.g., in plants, a transformed rootstock grafted to an untransformed scion).

[0542] The abovementioned growth characteristics may advantageously be modified in any plant. The methods of the invention are advantageously applicable to any plant. Plants that are particularly useful in the methods of the invention include all plants which belong to the superfamily Viridiplantae, in particular monocotyledonous and dicotyledonous plants including fodder or forage legumes, ornamental plants, food crops, trees or shrubs. According to a preferred embodiment of the present invention, the plant is a crop plant. Examples of crop plants include soybean, sunflower, canola, alfalfa, rapeseed, cotton, tomato, potato and tobacco. Further preferably, the plant is a monocotyledonous plant. Examples of monocotyledonous plants include sugarcane. More preferably the plant is a cereal. Examples of cereals include rice, maize, wheat, barley, millet, rye, triticale, sorghum and oats.

[0543] Other advantageous plants are selected from the group consisting of Asteraceae such as the genera Helianthus, Tagetes e.g. the species Helianthus annus [sunflower], Tagetes lucida, Tagetes erecta or Tagetes tenuifolia [Marigold], Brassicaceae such as the genera Brassica, Arabadopsis e.g. the species Brassica napus, Brassica rapa ssp. [canola, oilseed rape, turnip rape] or Arabidopsis thaliana; Fabaceae such as the genera Glycine e.g. the species Glycine max, Soja hispida or Soja max [soybean]; Linaceae such as the genera Linum e.g. the species Linum usitatissimum, [flax, linseed]; Poaceae such as the genera Hordeum, Secale, Avena, Sorghum, Oryza, Zea, Triticum e.g. the species Hordeum vulgare [barley]; Secale cereale [rye], Avena sativa, Avena fatua, Avena byzantina, Avena fatua var. sativa, Avena hybrida [oat], Sorghum bicolor [Sorghum, millet], Oryza sativa, Oryza latifolia [rice], Zea mays [corn, maize] Triticum aestivum, Triticum durum, Triticum turgidum, Triticum hybernum, Triticum macha, Triticum sativum or Triticum vulgare [wheat, bread wheat, common wheat]; Solanaceae such as the genera Solanum, Lycopersicon e.g. the species Solanum tuberosum [potato], Lycopersicon esculentum, Lycopersicon lycopersicum, Lycopersicon pyriforme, Solanum integrifolium or Solanum lycopersicum [tomato].

[0544] The present invention clearly extends to any plant cell or plant produced by any of the methods described herein, and to all plant parts and propagules thereof. The present invention extends further to encompass the progeny of a primary transformed or transfected cell, tissue, organ or whole plant that has been produced by any of the aforementioned methods, the only requirement being that progeny exhibit the same genotypic and/or phenotypic characteristic(s) as those produced by the parent in the methods according to the invention.

[0545] The invention also extends to harvestable parts of a plant such as, but not limited to seeds, leaves, fruits, flowers, stems, roots, rhizomes, tubers and bulbs. The invention furthermore relates to products derived, preferably directly derived, from a harvestable part of such a plant, such as dry pellets or powders, oil, fat and fatty acids, starch or proteins.

[0546] The present invention also encompasses use of a REV ΔHDZip/START nucleic acid sequence, for reduction of endogenous REV gene expression in a plant, plant part, or plant cell for increasing plant yield as defined hereinabove.

### CLE

[0547] It has now been found that modulating expression in a plant of a nucleic acid encoding a CLE-like polypeptide gives plants having enhanced yield-related traits relative to control plants.

[0548] Therefore, the invention provides a method for enhancing yield-related traits in plants relative to control plants, comprising modulating expression in a plant of a nucleic acid encoding a CLE-like polypeptide, or a part thereof.

[0549] A “reference”, “reference plant”, “control”, “control plant”, “wild type” or “wild type plant” is in particular a cell, a tissue, an organ, a plant, or a part thereof, which was not produced according to the method of the invention. Accordingly, the terms “wild type”, “control” or “reference” are exchangeable and can be a cell or a part of the plant such as an organelle or tissue, or a plant, which was not modified or treated according to the herein described method according to the invention. Accordingly, the cell or a part of the plant such as an organelle or a plant used as wild type, control or reference corresponds to the cell, plant or part thereof as much as possible and is in any other property but in the result of the process of the invention as identical to the subject matter of the invention as possible. Thus, the wild type, control or reference is treated identically or as identical as possible, saying that only conditions or properties might be different which do not influence the quality of the tested property. That means in other words that the wild type denotes (1) a plant, which carries the unaltered or not modulated form of a gene or allele or (2) the starting material/plant from which the plants produced by the process or method of the invention are derived.

[0550] Preferably, any comparison between the wild type plants and the plants produced by the method of the invention is carried out under analogous conditions. The term “analogous conditions” means that all conditions such as, for example, culture or growing conditions, assay conditions (such as buffer composition, temperature, substrates, pathogen strain, concentrations and the like) are kept identical between the experiments to be compared.

[0551] The “reference”, “control”, or “wild type” is preferably a subject, e.g. an organelle, a cell, a tissue, a plant, which was not modulated, modified or treated according to the herein described process of the invention and is in any other property as similar to the subject matter of the invention as possible. The reference, control or wild type is in its genome, transcriptome, proteome or metabolome as similar as possible to the subject of the present invention. Preferably, the term “reference-” “control-” or “wild type-”-organelle, -cell, -tissue or plant, relates to an organelle, cell, tissue or plant, which is nearly genetically identical to the organelle, cell, tissue or plant, of the present invention or a part thereof preferably 95%, more preferred are 98%, even more preferred are 99.00%, in particular 99.10%, 99.30%, 99.50%, 99.70%, 99.90%, 99.99%, 99.999% or more. Most preferable the “reference”, “control”, or “wild type” is preferably a subject, e.g. an organelle, a cell, a tissue, a plant, which is genetically identical to the plant, cell organelle used according to the method of the invention except that nucleic acid molecules or the gene product encoded by them are changed, modulated or modified according to the inventive method.

[0552] The term “modulation” means in relation to expression or gene expression, a process in which the expression level is changed by said gene expression in comparison to the control plant, preferably the expression level is decreased. The original, unmodulated expression may be of any kind of expression of a structural RNA (rRNA, tRNA) or mRNA with subsequent translation. The term “modulating the activity” shall mean any change of the expression of the inventive nucleic acid sequences or encoded proteins, which leads to increased yield and/or increased growth of the plants.

[0553] A preferred method for modulating (preferably, decreasing) expression of a nucleic acid encoding a CLE-like polypeptide is by introducing and expressing in a plant a genetic construct into which the nucleic acid encoding such a CLE-like polypeptide is cloned as an inverted repeat (in part or completely), separated by a spacer (non-coding DNA).

[0554] Any reference hereinafter to a “protein useful in the methods of the invention” is taken to mean a POI polypeptide as defined herein. Any reference hereinafter to a “nucleic acid useful in the methods of the invention” is taken to mean a nucleic acid capable of encoding such a POI polypeptide. The nucleic acid to be introduced into a plant (and therefore useful in performing the methods of the invention) is any nucleic acid encoding the type of protein which will now be described, hereafter also named “POI nucleic acid” or “POI gene”.

[0555] CLE-like polypeptide encoding genes are known in the art (see for example Cock and McCormick (Plant Physiol. 126, 939-942, 2001) and useful in the methods of the invention are nucleic acids encoding a CLE-like polypeptide, or a part thereof.

[0556] The term “CLE-like polypeptide” as defined herein refers to a polypeptide homologous to SEQ ID NO: 233. CLE-like polypeptides comprise an N-terminal signal sequence and a conserved motif (Cock and McCormick, 2001: FIG. 21), also known as CLE domain (Strabala et al., 2006), which is located at or near the C-terminus of the polypeptide. The unprocessed polypeptides are generally between 60 to 140 amino acids long and have a high isoelectric point, preferably above pl 7.0, more preferably above pl 8.0, most preferably above pl 9.0 (for example, the protein represented by SEQ ID NO: 233 has a pl of 10.46). After cleavage of signal sequence, the CLE-like polypeptide may be further processed by proteolytic cleavage in the C-terminal part, preferably at a conserved Arg residue in the N-terminal part of the CLE domain, thereby generating a biologically active short peptide encompassing most of the CLE domain (Ni and Clark, Plant Physiol. 140, 726-733, 2006).

[0557] The terms “domain” and “motif” are defined in the definitions section herein. Specialist databases exist for the identification of domains. The CLE domain in a CLE-like polypeptide may be identified using, for example, SMART (Schultz et al. (1998) Proc. Natl. Acad. Sci. USA 95, 5857-5864; Letunic et al. (2002) Nucleic Acids Res 30, 242-244), InterPro (Mulder et al., (2003) Nucl. Acids. Res. 31, 315-318), Prosite (Bucher and Bairoch (1994), A generalized profile syntax for biomolecular sequences motifs and its function in automatic sequence interpretation. (In) ISMB-94; Proceedings 2nd International Conference on Intelligent Systems for Molecular Biology. Altman R., Brutlag D., Karp P., Lathrop R., Searls D., Eds., pp. 53-61, AAAI Press, Menlo Park; Hulo et al., Nucl. Acids. Res. 32:D134-D137, (2004)) or Pfam (Bateman et al., Nucleic Acids Research 30(1): 276-280 (2002)). A set of tools for in silico analysis of protein sequences is available on the ExPASY proteomics server (hosted by the Swiss Institute of Bioinformatics (Gasteiger et al., ExPASy: the proteomics server for in-depth protein knowledge and analysis, Nucleic Acids Res. 31:3784-3788 (2003)). However, the CLE domain may also easily be identified upon sequence alignment of a putative CLE-like polypeptide with CLE-like polypeptides known in the art (such as those disclosed in Cock and McCormick (2001) or Strabala et al (2006).

[0558] The CLE domain preferably has the following consensus sequence (SEQ ID NO: 237):

(S/E/R/M/P/L) (K/E/D/R/S) R (K/I/L/R/F/Q/V/M)
(V/I/S/L) (P/L/R) (R/T/Q/C/N/G/K/S) (N/G) (S/P)
(D/N/Y) P (I/L/Q/R/Y/H) (H/L/I) (H/N).

[0559] More preferably, the CLE domain has the following sequence (SEQ ID NO: 238):

(S/P) (R/E/K) R (M/L/I) (V/S/I) P (Q/G/C/T/S) GP
(N/D) P (L/Q/H) H (H/N).

[0560] Most preferably, the CLE domain has the following sequence:

SRRMVPQGPNPLHN.

[0561] The CLE domain comprises a number of highly conserved amino acids, including the Arg residue necessary for proteolytic processing (Arg73 in SEQ ID NO: 233, see FIGS. 21 and 22), and two or three Pro residues.

[0562] Preferred for use in the methods of the invention is a nucleic acid encoding at least part of the CLE-like polypeptide, as represented by SEQ ID: 233, or a nucleic acid encoding at least part of a homologue of SEQ ID NO: 233. Examples of CLE-like polypeptides include SEQ ID NO: 233 and also encompasses homologues (including orthologues and paralogues) of SEQ ID NO: 233. The invention is illustrated by transforming rice plants with the Saccharum officinarum sequence represented by SEQ ID NO: 232, encoding the polypeptide of SEQ ID NO: 233. SEQ ID NO: 240 from Populus, SEQ ID NO: 242 from rice, SEQ ID NO: 246 from Arabidopsis and SEQ ID NO: 248 from Brassica napus represent orthologues of SEQ ID NO: 233. SEQ ID NO: 246 and SEQ ID NO: 250 are paralogues of each other.

[0563] Orthologues and paralogues may easily be found by performing a so-called reciprocal blast search. This may be done by a first BLAST involving BLASTing a query sequence (for example, SEQ ID NO: 241 or SEQ ID NO: 242) against any sequence database, such as the publicly available NCBI database. BLASTN or TBLASTX (using standard default values) may be used when starting from a nucleotide sequence and BLASTP or TBLASTN (using standard default values) may be used when starting from a protein sequence. The BLAST results may optionally be filtered. The full-length sequences of either the filtered results or non-filtered results are then BLASTed back (second BLAST) against sequences from the organism from which the query sequence is derived (where the query sequence is SEQ ID NO: 241 or SEQ ID NO: 242, the second BLAST would therefore be against rice sequences). The results of the first and second BLASTs are then compared. A paralogue is identified if a high-ranking hit from the second BLAST is from the same species as from which the query sequence is derived; an orthologue is identified if a high-ranking hit is not from the same species as from which the query sequence is derived. Preferred orthologues are orthologues of SEQ ID NO: 232 or SEQ ID NO: 233. High-ranking hits are those having a low E-value. The lower the E-value, the more significant the score (or in other words the lower the chance that the hit was found by chance). Computation of the E-value is well known in the art. In addition to E-values, comparisons are also scored by percentage identity. Percentage identity refers to the number of identical nucleotides (or amino acids) between the two compared nucleic acid (or polypeptide) sequences over a particular length. Preferably the score is greater than 50, more preferably greater than 100; and preferably the E-value is less than e-5, more preferably less than e-6. In the case of large families, ClustalW may be used, followed by the generation of a neighbour joining tree, to help visualize clustering of related genes and to identify orthologues and paralogues.

[0564] Homologues (or homologous proteins, encompassing orthologues and paralogues) may readily be identified using routine techniques well known in the art, such as by sequence alignment. Methods for the alignment of sequences for comparison are well known in the art, such methods include GAP, BESTFIT, BLAST, FASTA and TFASTA. GAP uses the algorithm of Needleman and Wunsch ((1970) J Mol Biol 48: 443-453) to find the alignment of two complete sequences that maximizes the number of matches and minimizes the number of gaps. The BLAST algorithm (Altschul et al. (1990) J Mol Biol 215: 403-410) calculates percent sequence identity and performs a statistical analysis of the similarity between the two sequences. The software for performing BLAST analysis is publicly available through the National Centre for Biotechnology Information. Homologues may readily be identified using, for example, the ClustalW multiple sequence alignment algorithm (version 1.83), with the default pairwise alignment parameters, and a scoring method in percentage. Global percentages of similarity and identity may also be determined using one of the methods available in the MatGAT software package (Campanella et al., BMC Bioinformatics. 4, 29, 2003). Minor manual editing may be performed to optimise alignment between conserved motifs, as would be apparent to a person skilled in the art. Furthermore, instead of using full-length sequences for the identification of homologues, specific domains (such as the CLE domain) may be used as well. The sequence identity values, which are indicated below as a percentage were determined over the entire nucleic acid or amino acid sequence using the programs mentioned above using the default parameters.

[0565] Preferably, the CLE-like polypeptides useful in the methods of the present invention have, in increasing order of preference, at least 30%, 35%, 40%, 45%, 50%, 55%, 60%, 65%, 70%, 75%, 80%, 85%, 90%, 95%, 96%, 97%, 98% or 99% sequence identity to the polypeptide of SEQ ID NO: 233. Alternatively, the sequence identity among homologues may be determined using a specific domain (such as the CLE domain). A CLE domain may be identified and delineated using the databases and tools for protein identification listed above, and/or methods for the alignment of sequences for comparison. In some instances, default parameters may be adjusted to modify the stringency of the search. For example using BLAST, the statistical significance threshold (called “expect” value) for reporting matches against database sequences may be increased to show less stringent matches. In this way, short nearly exact matches may be identified.

[0566] The term CLE-like nucleic acid as used herein, refers to any nucleic acid encoding a CLE-like polypeptide as defined above, or the complement thereof. The CLE-like nucleic acid need not be full-length nucleic acids, since performance of the methods of the invention does not rely on the use of full-length nucleic acid sequences. Furthermore, examples of nucleic acids suitable for use in performing the methods of the invention include but are not limited to those represented by any one of: SEQ ID NO: 232, SEQ ID NO: 239, SEQ ID NO: 241, SEQ ID NO: 243, SEQ ID NO: 245 or SEQ ID NO: 247. Nucleic acid variants may also be useful in practising the methods of the invention. Examples of such variants include portions of nucleic acids, hybridising sequences, splice variants, allelic variants either naturally occurring or by DNA manipulation.

[0567] Reference herein to a “CLE-like” nucleic acid sequence is taken to mean a sufficient length of substantially contiguous nucleotides from a CLE-like nucleic acid sequence. In order to perform gene silencing, this may be as little as 20, 19, 18, 17, 16, 15, 14, 13, 12, 11, 10 or fewer nucleotides, alternatively this may be as much as the CLE-like nucleic acid sequence (including the 5′ and/or 3′ UTR, either in part or in whole). A nucleic acid sequence encoding a (functional) polypeptide is not a requirement for the various methods discussed above for the substantial reduction of expression of an endogenous CLE-like gene.

[0568] The term “portion” or “part” of a CLE-like nucleic acid as used herein refers to a piece of DNA encoding at least part of a CLE-like polypeptide, or the complement thereof, but may also be a part of the 5′ or 3′ untranslated region (UTR) of a CLE polypeptide encoding cDNA, or the complement thereof, or may be the entire 5′ or 3′ UTR, or its complement. The term cDNA as used herein is meant to encompass not only the coding sequences, but also the non-coding sequences that correspond to the 5′ and 3′ UTRs of the mRNA.

[0569] The terms “fragment”, “fragment of a sequence” or “part of a sequence” “portion” or “portion thereof” mean a truncated sequence of the original sequence referred to. The truncated sequence (nucleic acid or protein sequence) can vary widely in length; the minimum size being a sequence of sufficient size to provide a sequence with at least a comparable function and/or activity of the original sequence referred to or hybidizing with the nucleic acid molecule of the invention or used in the process of the invention under stringend conditions, while the maximum size is not critical. In some applications, the maximum size usually is not substantially greater than that required to provide the desired activity and/or function(s) of the original sequence. A comparable function means at least 40%, 45% or 50%, preferably at least 60%, 70%, 80% or 90% or more of the original sequence.

[0570] A portion may be prepared, for example, by making one or more deletions to a nucleic acid encoding a CLE-like polypeptide as defined hereinabove. The portions may be used in isolated form or they may be fused to other coding (or non-coding) sequences. The portion is typically at least 100 nucleotides in length, preferably at least 200, 250 nucleotides in length, more preferably at least 300, 350 nucleotides in length and most preferably at least 400 or 450 nucleotides in length. Preferably, the portion is a portion of a nucleic acid as represented by any one of SEQ ID NO: 232, SEQ ID NO: 239, SEQ ID NO: 241, SEQ ID NO: 243, SEQ ID NO: 245 or SEQ ID NO: 247. Most preferably the portion is a portion of a nucleic acid as represented by SEQ ID NO: 232. A preferred portion of a CLE-like nucleic acid for use in the methods of the present invention is a portion having high homology to the transcribed sequence of the endogenous target CLE-like gene or to the complement thereof, while having low homology or no homology to transcribed sequences (or the complement sequences thereof) of endogenous non-target CLE-like genes

[0571] Another nucleic acid variant useful in the methods of the invention, is a nucleic acid capable of hybridising under reduced stringency conditions, preferably under stringent conditions, with a nucleic acid encoding a CLE-like polypeptide as defined hereinabove, or a with a portion as defined hereinabove.

[0572] Hybridising sequences useful in the methods of the invention, encode at least part of a CLE-like polypeptide as defined above, or are capable of hybridising to the 5′ or 3′ UTR of a CLE-like polypeptide encoding mRNA or cDNA. The hybridising sequence is typically at least 100 nucleotides in length, preferably at least 200 nucleotides in length, more preferably at least 300 nucleotides in length and most preferably at least 400 nucleotides nucleotides in length. Preferably, the hybridising sequence is one that is capable of hybridising to any of the nucleic acids represented by (or to probes derived from) SEQ ID NO: 232, SEQ ID NO: 239, SEQ ID NO: 241, SEQ ID NO: 243, SEQ ID NO: 245 or SEQ ID NO: 247, or to a portion of any of the aforementioned sequences, a portion being as defined above. Most preferably the hybridising sequence is capable of hybridising to SEQ ID NO: 232, or to portions (or probes) thereof. Methods for designing probes are well known in the art. Probes are generally less than 500, 400, 300, 200 bp in length, preferably less than 100 bp in length. Commonly, probe lengths for DNA-DNA hybridisations such as Southern blotting, vary between 100 and 500 bp, whereas the hybridising region in probes for DNA-DNA hybridisations such as in PCR amplification generally are shorter than 50 but longer than 10 nucleotides, preferably they are 15, 20, 25, 30, 35, 40, 45 or 50 bp in length.

[0573] Another nucleic acid variant useful in the methods of the invention is a splice variant encoding a CLE-like polypeptide as defined hereinabove. Preferred splice variants are splice variants of a nucleic acid encoding the CLE-like polypeptide represented by SEQ ID NO: 233, or splice variants encoding orthologues or paralogues of SEQ ID NO: 233. Further preferred are splice variants of nucleic acids represented by any one of SEQ ID NO: 232, SEQ ID NO: 239, SEQ ID NO: 241, SEQ ID NO: 243, SEQ ID NO: 245 or SEQ ID NO: 247. Most preferred is a splice variant of a nucleic acid as represented by SEQ ID NO: 232.

[0574] Another nucleic acid variant useful in performing the methods of the invention is an allelic variant of a nucleic acid encoding a CLE-like protein as defined hereinabove. Allelic variants exist in nature, and encompassed within the methods of the present invention is the use of these natural alleles. The allelic variant may be an allelic variant of a nucleic acid encoding a CLE-like polypeptide represented by SEQ ID NO: 233, or an allelic variant of a nucleic acid encoding orthologues or paralogues of any of the aforementioned SEQ ID NOs. Further preferred are allelic variants of nucleic acids represented by any one of SEQ ID NO: 232, SEQ ID NO: 239, SEQ ID NO: 241, SEQ ID NO: 243, SEQ ID NO: 245 or SEQ ID NO: 247. Most preferred is an allelic variant of a nucleic acid as represented by SEQ ID NO: 232.

[0575] According to the present invention, there is provided a method for enhancing yield-related traits in plants, comprising introducing and expressing in a plant portions, hybridising sequences, splice variants, or allelic variants of any one of the nucleic acids given in Table HH of Example 33, or comprising introducing and expressing in a plant portions, hybridising sequences, splice variants, or allelic variants of a nucleic acid encoding an orthologue, paralogue or homologue of any of the amino acid sequences given in Table HH of Example 33.

[0576] A further nucleic acid variant useful in the methods of the invention is a nucleic acid variant obtained by gene shuffling. Gene shuffling or directed evolution may also be used to generate variants of nucleic acids encoding CLE-like polypeptides as defined above. Furthermore, nucleic acid variants may also be obtained by site-directed mutagenesis. Several methods are available to achieve site-directed mutagenesis, the most common being PCR based methods (Current Protocols in Molecular Biology. Wiley Eds.).

[0577] Also useful in the methods of the invention are nucleic acids encoding homologues of any one of the amino acids represented by SEQ ID NO 233, or orthologues or paralogues of thereof; and nucleic acids encoding derivatives of the polypeptide represented by SEQ ID NO 233 or orthologues or paralogues thereof.

[0578] Furthermore, CLE-like nucleic acids useful in the methods of the present invention (at least in their native form) typically, but not necessarily, encode polypeptides having signalling activity. Preferably, CLE-like nucleic acids encode polypeptides which, when overexpressed in plants, cause a wus-like phenotype. Further preferably, a CLE-like polypeptide, when overexpressed in Arabidopsis, results in a Aii phenotype as defined by Strabala et al. (2006). More preferably, a CLE-like nucleic acid, when expressed as an inverted repeat under control of the promoter represented by SEQ ID NO: 236 in rice results in increased seed yield, such as increased total seed weight.

[0579] Nucleic acids encoding CLE-like polypeptides may be derived from any natural or artificial source. The nucleic acid may be modified from its native form in composition and/or genomic environment through deliberate human manipulation. Preferably the CLE-like polypeptide-encoding nucleic acid is from a plant, further preferably from a monocotyledonous plant, more preferably from the family of Poaceae, most preferably the nucleic acid is from Saccharum officinarum.

[0580] The invention also provides genetic constructs and vectors to facilitate introduction and/or expression of the nucleic acid sequences useful in the methods according to the invention, in a plant.

[0581] Therefore, there is provided a gene construct comprising:
[0582] (i) a CLE-like nucleic acid as defined hereinabove, or a portion thereof;
[0583] (ii) one or more control sequences operably linked to the nucleic acid of (i).

[0584] A preferred construct is one comprising an inverted repeat of a CLE-like nucleic acid, preferably capable of forming a hairpin structure, which inverted repeat is under the control of a seed specific promoter.

[0585] Constructs useful in the methods according to the present invention may be constructed using recombinant DNA technology well known to persons skilled in the art. The gene constructs may be inserted into vectors, which may be commercially available, suitable for transforming into plants and suitable for transcribing of the gene of interest in the transformed cells. The invention therefore provides use of a gene construct as defined hereinabove in the methods of the invention.

[0586] Plants are transformed with a vector comprising the sequence of interest. The skilled artisan is well aware of the genetic elements that must be present on the vector in order to successfully transform, select and propagate host cells containing the sequence of interest. The sequence of interest is operably linked to one or more control sequences (at least to a promoter).

[0587] Advantageously, any type of promoter may be used in the methods of the present invention. Preferred promoters are in particular those which bring gene expression in tissues and organs, in seed cells, such as endosperm cells and cells of the developing embryo. Suitable promoters are the oilseed rape napin gene promoter (U.S. Pat. No. 5,608,152), the Vicia faba USP promoter (Baeumlein et al., Mol Gen Genet, 1991, 225 (3): 459-67), the Arabidopsis oleosin promoter (WO 98/45461), the Phaseolus vulgaris phaseolin promoter (U.S. Pat. No. 5,504,200), the Brassica Bce4 promoter (WO 91/13980), the bean arc5 promoter, the carrot DcG3 promoter, or the Legumin B4 promoter (LeB4; Baeumlein et al., 1992, Plant Journal, 2 (2): 233-9), and promoters which bring about the seed-specific expression in monocotyledonous plants such as maize, barley, wheat, rye, rice and the like. Advantageous seed-specific promoters are the sucrose binding protein promoter (WO 00/26388), the phaseolin promoter and the napin promoter. Suitable promoters which must be considered are the barley lpt2 or Ipt1 gene promoter (WO 95/15389 and WO 95/23230), and the promoters described in WO 99/16890 (promoters from the barley hordein gene, the rice glutelin gene, the rice oryzin gene, the rice prolamin gene, the wheat gliadin gene, the wheat glutelin gene, the maize zein gene, the oat glutelin gene, the sorghum kasirin gene and the rye secalin gene). Further suitable promoters are Amy32b, Amy 6-6 and Aleurain [U.S. Pat. No. 5,677,474], Bce4 (oilseed rape) [U.S. Pat. No. 5,530,149], glycinin (soya) [EP 571 741], phosphoenolpyruvate carboxylase (soya) [JP 06/62870], ADR12-2 (soya) [WO 98/08962], isocitrate lyase (oilseed rape) [U.S. Pat. No. 5,689,040] or a amylase (barley) [EP 781 849]. Other promoters which are available for the expression of genes in plants are leaf-specific promoters such as those described in DE-A 19644478 or light-regulated promoters such as, for example, the pea petE promoter.

[0588] Preferably, the CLE-like nucleic acid or variant thereof is operably linked to a seed-specific promoter. A seed-specific promoter is transcriptionally active predominantly in seed tissue, but not necessarily exclusively in seed tissue (in cases of leaky expression). The seed-specific promoter may be active during seed development and/or during germination. Seed-specific promoters are well known in the art. Preferably, the seed-specific promoter is an endosperm specific promoter. More preferably, the promoter is a rice Prolamine RP6 or a functionally equivalent promoter. Most preferably, the promoter sequence is as represented by SEQ ID NO: 236. It should be clear that the applicability of the present invention is not restricted to the CLE-like nucleic acid represented by SEQ ID NO: 232, nor is the applicability of the invention restricted to transcription of a CLE-like nucleic acid when driven by a seed-specific promoter. Examples of other seed-specific promoters (including endosperm specific promoters) are listed above.

[0589] Optionally, one or more terminator sequences may be used in the construct introduced into a plant. An intron sequence may also be added to the 5′ untranslated region (UTR) or in the coding sequence to increase the amount of the mature message that accumulates in the cytosol. Other control sequences (besides promoter, enhancer, silencer, intron sequences, 3′UTR and/or 5′UTR regions) may be protein and/or RNA stabilizing elements. Such sequences would be known or may readily be obtained by a person skilled in the art.

[0590] The genetic constructs of the invention may further include an origin of replication sequence that is required for maintenance and/or replication in a specific cell type. One example is when a genetic construct is required to be maintained in a bacterial cell as an episomal genetic element (e.g. plasmid or cosmid molecule). Preferred origins of replication include, but are not limited to, the f1-ori and colE1.

[0591] For the detection and/or selection of the successful transfer of the nucleic acid sequences as depicted in the sequence protocol and used in the process of the invention, it is advantageous to use marker genes (=reporter genes). Therefore genetic construct may optionally comprise a selectable marker gene. These marker genes enable the identification of a successful transfer of the nucleic acid molecules via a series of different principles, for example via visual identification with the aid of fluorescence, luminescence or in the wavelength range of light which is discernible for the human eye, by a resistance to herbicides or antibiotics, via what are known as nutritive markers (auxotrophism markers) or antinutritive markers, via enzyme assays or via phytohormones. Examples of such markers which may be mentioned are GFP (=green fluorescent protein); the luciferin/luceferase system, the β-galactosidase with its colored substrates, for example X-Gal, the herbicide resistances to, for example, imidazolinone, glyphosate, phosphinothricin or sulfonylurea, the antibiotic resistances to, for example, bleomycin, hygromycin, streptomycin, kanamycin, tetracyclin, chloramphenicol, ampicillin, gentamycin, geneticin (G418), spectinomycin or blasticidin, to mention only a few, nutritive markers such as the utilization of mannose or xylose, or antinutritive markers such as the resistance to 2-deoxyglucose. Preferred selectable markers in plants comprise those, which confer resistance to an herbicide such as glyphosate or gluphosinate. Other suitable markers are, for example, markers, which encode genes involved in biosynthetic pathways of, for example, sugars or amino acids, such as β galactosidase, ura3 or ilv2. Markers, which encode genes such as luciferase, gfp or other fluorescence genes, are likewise suitable. These markers and the aforementioned markers can be used in mutants in whom these genes are not functional since, for example, they have been deleted by conventional methods. This list is a small number of possible markers. The skilled worker is very familiar with such markers. Different markers are preferred, depending on the organism and the selection method.

[0592] In a preferred embodiment of the present invention, modulated expression of a CLE-like protein is decreased expression of a CLE-like protein, preferably decreased expression of an endogenous CLE-like protein.

[0593] Reference herein to an “endogenous” CLE-like gene not only refers to a CLE-like gene as found in a plant in its natural form (i.e., without there being any human intervention), but also refers to isolated CLE-like nucleic acid sequences subsequently introduced into a plant. For example, a transgenic plant containing a CLE-like transgene may encounter a substantial reduction of the transgene expression and/or substantial reduction of expression of an endogenous CLE-like gene, according to the methods of the invention.

[0594] A preferred method for decreasing expression of a CLE-like protein is by using an expression vector into which a CLE-like nucleic acid sequence encoding CLE-like polypeptide has been cloned as an inverted repeat (in part or completely), separated by a spacer (non-coding DNA).

[0595] “Reduction” or “decrease” or “downregulation” of expression or “gene silencing” are used interchangeably herein, and are defined above. Preferably, the decreased expression is not complete elimination of expression. Preferably, reducing the expression of the endogenous CLE-like gene using a CLE-like nucleic acid sequence leads to the appearance of one or more phenotypic traits.

[0596] This reduction of endogenous CLE-like gene expression may be achieved by using any one or more of several well-known “gene silencing” methods, as described above.

[0597] A preferred method for reducing expression in a plant of an endogenous CLE-like gene via RNA-mediated silencing is by using an inverted repeat of a CLE-like nucleic acid or a part thereof, preferably capable of froming a hairpin structure. The inverted repeat is cloned in an expression vector comprising control sequences. A non-coding DNA nucleic acid sequence (a spacer, for example a matrix attachment region fragment (MAR), an intron, a polylinker, etc) is located between the two inverted CLE-like nucleic acids forming the inverted repeat. After transcription of the inverted repeat, a chimeric RNA with a self-complementary structure is formed (partial or complete). This double-stranded RNA structure is referred to as the hairpin RNA (hpRNA). The hpRNA is processed by the plant into siRNAs that are incorporated into a RISC. The RISC further cleaves the mRNA transcripts encoding a CLE-like polypeptide, thereby substantially reducing the number of mRNA transcripts to be translated into a CLE-like polypeptide. See for example, Grierson et al. (1998) WO 98/53083; Waterhouse et al. (1999) WO 99/53050).

[0598] Preferably, a CLE-like nucleic acid sequence from any given plant species is introduced into that same species. For example, a CLE-like nucleic acid sequence from rice is transformed into a rice plant. However, it is not an absolute requirement that the CLE-like nucleic acid sequence to be introduced originates from the same plant species as the plant in which it will be introduced, as shown in the examples section where a sugarcane sequence is introduced into rice to obtain the desired effects. It is sufficient that there is substantial homology between the endogenous CLE-like target gene and the CLE-like nucleic acid to be introduced.

[0599] The expression of an endogenous CLE-like gene may also be reduced by introducing a genetic modification, within the locus of the CLE-like gene or elsewhere in the genome. The locus of a gene as defined herein is taken to mean a genomic region, which includes the gene of interest and 10 kb up- or down stream of the coding region.

[0600] The genetic modification may be introduced, for example, by any one (or more) of the following methods: T-DNA tagging, TILLING, site-directed mutagenesis, directed evolution, homologous recombination. Following introduction of the genetic modification, there follows a step of selecting for reduced expression of an endogenous CLE-like gene, which reduction in expression gives plants having increased yield compared to control plants.

[0601] Site-directed mutagenesis and random mutagenesis may be used to generate variants of CLE-like nucleic acid sequences which variants encode CLE-like polypeptides with reduced activity. Several methods are available to achieve site-directed mutagenesis, the most common being PCR based methods (see for example Current Protocols in Molecular Biology. Wiley Eds).

[0602] Directed evolution may also be used to generate variants of CLE-like nucleic acid sequences which variants encode CLE-like polypeptides with reduced activity.

[0603] T-DNA tagging, TILLING, site-directed mutagenesis and directed evolution are examples of technologies that enable the generation of novel alleles and variants of CLE-like nucleic acid sequences which variants encode CLE-like polypeptides with reduced activity.

[0604] Homologous recombination allows introduction in a genome of a selected nucleic acid at a defined selected position. The nucleic acid to be targeted may be an allele encoding CLE-like polypeptide with reduced activity, used to replace the endogenous gene, and needs to be targeted to the locus of the CLE-like gene.

[0605] Alternatively, a screening program may be set up to identify in a plant population natural variants of a CLE-like gene which variants encode CLE-like polypeptides with reduced activity. Such natural variants may also be used for example, to perform homologous recombination.

[0606] The methods of the invention are advantageously applicable to any plant. Plants that are particularly useful in the methods of the invention include all plants which belong to the superfamily Viridiplantae, in particular monocotyledonous and dicotyledonous plants including fodder or forage legumes, ornamental plants, food crops, trees or shrubs. According to a preferred embodiment of the present invention, the plant is a crop plant. Examples of crop plants include soybean, sunflower, canola, alfalfa, rapeseed, cotton, tomato, potato and tobacco. Further preferably, the plant is a monocotyledonous plant. Examples of monocotyledonous plants include sugarcane. More preferably the plant is a cereal. Examples of cereals include rice, maize, wheat, barley, millet, rye, triticale, sorghum and oats.

[0607] Other advantageous plants are selected from the group consisting of Asteraceae such as the genera Helianthus, Tagetes e.g. the species Helianthus annus [sunflower], Tagetes lucida, Tagetes erecta or Tagetes tenuifolia [Marigold], Brassicaceae such as the genera Brassica, Arabadopsis e.g. the species Brassica napus, Brassica rapa ssp. [canola, oilseed rape, turnip rape] or Arabidopsis thaliana. Fabaceae such as the genera Glycine e.g. the species Glycine max, Soja hispida or Soja max [soybean]. Linaceae such as the genera Linum e.g. the species Linum usitatissimum, [flax, linseed]; Poaceae such as the genera Hordeum, Secale, Avena, Sorghum, Oryza, Zea, Triticum e.g. the species Hordeum vulgare [barley]; Secale cereale [rye], Avena sativa, Avena fatua, Avena byzantina, Avena fatua var. sativa, Avena hybrida [oat], Sorghum bicolor [Sorghum, millet], Oryza sativa, Oryza latifolia [rice], Zea mays [corn, maize] Triticum aestivum, Triticum durum, Triticum turgidum, Triticum hybernum, Triticum macha, Triticum sativum or Triticum vulgare [wheat, bread wheat, common wheat]; Solanaceae such as the genera Solanum, Lycopersicon e.g. the species Solanum tuberosum [potato], Lycopersicon esculentum, Lycopersicon lycopersicum, Lycopersicon pyriforme, Solanum integrifolium or Solanum lycopersicum [tomato].

[0608] The present invention also encompasses plants obtainable by the methods according to the present invention. The present invention therefore provides plants, plant parts or plant cells thereof obtainable by the method according to the present invention, which plants or parts or cells thereof comprise a nucleic acid transgene encoding a CLE-like protein as defined above.

[0609] The invention furthermore provides a method for the production of transgenic plants having altered yield-related trait relative to control plants, comprising introduction and expression in a plant of a CLE-like nucleic acid as defined hereinabove and useful in a method for downregulating expression as discussed above.

[0610] Host plants for the nucleic acids or the vector used in the method according to the invention, the expression cassette or construct or vector are, in principle, advantageously all plants, which are capable of synthesizing the polypeptides used in the inventive method.

[0611] More specifically, the present invention provides a method for the production of transgenic plants having altered yield-related traits, which method comprises:
[0612] (i) introducing and expressing a CLE-like nucleic acid in a construct for downregulating CLE-like gene expression into a plant cell; and
[0613] (ii) cultivating the plant cell under conditions promoting plant growth and development.

[0614] The nucleic acid may be introduced directly into a plant cell or into the plant itself (including introduction into a tissue, organ or any other part of a plant). According to a preferred feature of the present invention, the nucleic acid is preferably introduced into a plant by transformation.

[0615] Further preferably the construct for downregulating CLE-like gene expression and introduced into the plant cell or plant comprise an inverted repeat of the CLE-like nucleic acid or a part thereof.

[0616] The transfer of foreign genes into the genome of a plant is called transformation. In doing this the methods described for the transformation and regeneration of plants from plant tissues or plant cells are utilized for transient or stable transformation. An advantageous transformation method is the transformation in planta. To this end, it is possible, for example, to allow the agrobacteria to act on plant seeds or to inoculate the plant meristem with agrobacteria. It has proved particularly expedient in accordance with the invention to allow a suspension of transformed agrobacteria to act on the intact plant or at least the flower primordia. The plant is subsequently grown on until the seeds of the treated plant are obtained (Clough and Bent, Plant J. (1998) 16, 735-743). To select transformed plants, the plant material obtained in the transformation is, as a rule, subjected to selective conditions so that transformed plants can be distinguished from untransformed plants. For example, the seeds obtained in the above-described manner can be planted and, after an initial growing period, subjected to a suitable selection by spraying. A further possibility consists in growing the seeds, if appropriate after sterilization, on agar plates using a suitable selection agent so that only the transformed seeds can grow into plants. Further advantageous transformation methods, in particular for plants, are known to the skilled worker and are described herein below

[0617] Generally after transformation, plant cells or cell groupings are selected for the presence of one or more markers which are encoded by plant-expressible genes co-transferred with the gene of interest, following which the transformed material is regenerated into a whole plant.

[0618] As mentioned Agrobacteria transformed with an expression vector according to the invention may also be used in the manner known per se for the transformation of plants such as experimental plants like Arabidopsis or crop plants, such as, for example, cereals, maize, oats, rye, barley, wheat, soya, rice, cotton, sugarbeet, canola, sunflower, flax, hemp, potato, tobacco, tomato, carrot, bell peppers, oilseed rape, tapioca, cassaya, arrow root, tagetes, alfalfa, lettuce and the various tree, nut, and grapevine species, in particular oil-containing crop plants such as soya, peanut, castor-oil plant, sunflower, maize, cotton, flax, oilseed rape, coconut, oil palm, safflower (Carthamus tinctorius) or cocoa beans, for example by bathing scarified leaves or leaf segments in an agrobacterial solution and subsequently growing them in suitable media.

[0619] The genetically modified plant cells can be regenerated via all methods with which the skilled worker is familiar. Suitable methods can be found in the abovementioned publications by S. D. Kung and R. Wu, Potrykus or Höfgen and Willmitzer. To select transformed plants, the plant material obtained in the transformation is, as a rule, subjected to selective conditions so that transformed plants can be distinguished from untransformed plants. For example, the seeds obtained in the above-described manner can be planted and, after an initial growing period, subjected to a suitable selection by spraying. A further possibility consists in growing the seeds, if appropriate after sterilization, on agar plates using a suitable selection agent so that only the transformed seeds can grow into plants. Alternatively, the transformed plants are screened for the presence of a selectable marker such as the ones described above.

[0620] Following DNA transfer and regeneration, putatively transformed plants may be evaluated, for instance using Southern analysis, for the presence of the gene of interest, copy number and/or genomic organisation. Alternatively or additionally, downregulation of expression levels of the targeted CLE-like gene may be monitored using Northern and/or Western analysis, or quantitative PCR, all techniques being well known to persons having ordinary skill in the art.

[0621] The generated transformed plants may be propagated by a variety of means, such as by clonal propagation or classical breeding techniques. For example, a first generation (or T1) transformed plant may be selfed to give homozygous second generation (or T2) transformants, and the T2 plants further propagated through classical breeding techniques.

[0622] The generated transformed organisms may take a variety of forms. For example, they may be chimeras of transformed cells and non-transformed cells; clonal transformants (e.g., all cells transformed to contain the expression cassette); grafts of transformed and untransformed tissues (e.g., in plants, a transformed rootstock grafted to an untransformed scion).

[0623] The present invention clearly extends to any plant cell or plant produced by any of the methods described herein, and to all plant parts and propagules thereof. The present invention extends further to encompass the progeny of a primary transformed or transfected cell, tissue, organ or whole plant that has been produced by any of the aforementioned methods, the only requirement being that progeny exhibit the same genotypic and/or phenotypic characteristic(s) as those produced by the parent in the methods according to the invention.

[0624] The invention also includes host cells containing an isolated CLE-like nucleic acid as defined hereinabove. Preferred host cells according to the invention are plant cells. Host plants for the nucleic acids or the vector used in the method according to the invention, the expression cassette or construct or vector are, in principle, advantageously all plants, which are capable of synthesizing the polypeptides used in the inventive method.

[0625] The invention also extends to harvestable parts of a plant such as, but not limited to seeds, leaves, fruits, flowers, stems, roots, rhizomes, tubers and bulbs. The invention furthermore relates to products derived, preferably directly derived, from a harvestable part of such a plant, such as dry pellets or powders, oil, fat and fatty acids, starch or proteins.

[0626] Advantageously, performance of the methods according to the present invention results in plants having enhanced yield related traits, particularly increased yield, more particularly increased seed yield and/or increased biomass, relative to control plants.

[0627] Performance of the methods of the invention gives plants having enhanced yield-related traits. In particular performance of the methods of the invention gives plants having increased yield, especially increased seed yield relative to control plants. The terms “yield” and “seed yield” are described in more detail in the “definitions” section herein.

[0628] Reference herein to enhanced yield-related traits is taken to mean an increase in biomass (weight) of one or more parts of a plant, which may include aboveground (harvestable) parts and/or (harvestable) parts below ground. In particular, such harvestable parts are seeds and/or biomass, and performance of the methods of the invention results in plants having increased seed yield relative to the seed yield of control plants.

[0629] Taking corn as an example, a yield increase may be manifested as one or more of the following: increase in the number of plants established per hectare or acre, an increase in the number of ears per plant, an increase in the number of rows, number of kernels per row, kernel weight, thousand kernel weight, ear length/diameter, increase in the seed filling rate (which is the number of filled seeds divided by the total number of seeds and multiplied by 100), among others. Taking rice as an example, a yield increase may manifest itself as an increase in one or more of the following: number of plants per hectare or acre, number of panicles per plant, number of spikelets per panicle, number of flowers (florets) per panicle (which is expressed as a ratio of the number of filled seeds over the number of primary panicles), increase in the seed filling rate (which is the number of filled seeds divided by the total number of seeds and multiplied by 100), increase in thousand kernel weight, among others.

[0630] The present invention provides a method for increasing yield, especially seed yield of plants, relative to control plants, which method comprises modulating expression, preferably increasing expression, in a plant of a nucleic acid encoding a CLE-like polypeptide as defined herein.

[0631] Since the transgenic plants according to the present invention have increased yield, it is likely that these plants exhibit an increased growth rate (during at least part of their life cycle), relative to the growth rate of control plants at a corresponding stage in their life cycle.

[0632] The increased growth rate may be specific to one or more parts of a plant (including seeds), or may be throughout substantially the whole plant. Plants having an increased growth rate may have a shorter life cycle. The life cycle of a plant may be taken to mean the time needed to grow from a dry mature seed up to the stage where the plant has produced dry mature seeds, similar to the starting material. This life cycle may be influenced by factors such as early vigour, growth rate, greenness index, flowering time and speed of seed maturation. The increase in growth rate may take place at one or more stages in the life cycle of a plant or during substantially the whole plant life cycle. Increased growth rate during the early stages in the life cycle of a plant may reflect enhanced vigour. The increase in growth rate may alter the harvest cycle of a plant allowing plants to be sown later and/or harvested sooner than would otherwise be possible (a similar effect may be obtained with earlier flowering time). If the growth rate is sufficiently increased, it may allow for the further sowing of seeds of the same plant species (for example sowing and harvesting of rice plants followed by sowing and harvesting of further rice plants all within one conventional growing period). Similarly, if the growth rate is sufficiently increased, it may allow for the further sowing of seeds of different plants species (for example the sowing and harvesting of corn plants followed by, for example, the sowing and optional harvesting of soybean, potato or any other suitable plant). Harvesting additional times from the same rootstock in the case of some crop plants may also be possible. Altering the harvest cycle of a plant may lead to an increase in annual biomass production per acre (due to an increase in the number of times (say in a year) that any particular plant may be grown and harvested). An increase in growth rate may also allow for the cultivation of transgenic plants in a wider geographical area than their wild-type counterparts, since the territorial limitations for growing a crop are often determined by adverse environmental conditions either at the time of planting (early season) or at the time of harvesting (late season). Such adverse conditions may be avoided if the harvest cycle is shortened. The growth rate may be determined by deriving various parameters from growth curves, such parameters may be: T-Mid (the time taken for plants to reach 50% of their maximal size) and T-90 (time taken for plants to reach 90% of their maximal size), amongst others.

[0633] According to a preferred feature of the present invention, performance of the methods of the invention gives plants having an increased growth rate relative to control plants. Therefore, according to the present invention, there is provided a method for increasing the growth rate of plants, which method comprises modulating expression, preferably increasing expression, in a plant of a nucleic acid encoding a CLE-like polypeptide as defined herein.

[0634] An increase in yield and/or growth rate occurs whether the plant is under non-stress conditions or whether the plant is exposed to various stresses compared to control plants. Plants typically respond to exposure to stress by growing more slowly. In conditions of severe stress, the plant may even stop growing altogether. Mild stress on the other hand is defined herein as being any stress to which a plant is exposed which does not result in the plant ceasing to grow altogether without the capacity to resume growth. Mild stress in the sense of the invention leads to a reduction in the growth of the stressed plants of less than 40%, 35% or 30%, preferably less than 25%, 20% or 15%, more preferably less than 14%, 13%, 12%, 11% or 10% or less in comparison to the control plant under non-stress conditions. Due to advances in agricultural practices (irrigation, fertilization, pesticide treatments) severe stresses are not often encountered in cultivated crop plants. As a consequence, the compromised growth induced by mild stress is often an undesirable feature for agriculture. Mild stresses are the everyday biotic and/or abiotic (environmental) stresses to which a plant is exposed. Abiotic stresses may be due to drought or excess water, anaerobic stress, salt stress, chemical toxicity, oxidative stress and hot, cold or freezing temperatures. The abiotic stress may be an osmotic stress caused by a water stress (particularly due to drought), salt stress, oxidative stress or an ionic stress. Biotic stresses are typically those stresses caused by pathogens, such as bacteria, viruses, fungi and insects.

[0635] In particular, the methods of the present invention may be performed under non-stress conditions or under conditions of mild drought to give plants having increased yield relative to control plants. As reported in Wang et al. (Planta (2003) 218: 1-14), abiotic stress leads to a series of morphological, physiological, biochemical and molecular changes that adversely affect plant growth and productivity. Drought, salinity, extreme temperatures and oxidative stress are known to be interconnected and may induce growth and cellular damage through similar mechanisms. Rabbani et al. (Plant Physiol (2003) 133: 1755-1767) describes a particularly high degree of “cross talk” between drought stress and high-salinity stress. For example, drought and/or salinisation are manifested primarily as osmotic stress, resulting in the disruption of homeostasis and ion distribution in the cell. Oxidative stress, which frequently accompanies high or low temperature, salinity or drought stress, may cause denaturing of functional and structural proteins. As a consequence, these diverse environmental stresses often activate similar cell signalling pathways and cellular responses, such as the production of stress proteins, up-regulation of anti-oxidants, accumulation of compatible solutes and growth arrest. The term “non-stress” conditions as used herein are those environmental conditions that allow optimal growth of plants. Persons skilled in the art are aware of normal soil conditions and climatic conditions for a given location.

[0636] Performance of the methods of the invention gives plants grown under non-stress conditions or under mild drought conditions increased yield relative to control plants grown under comparable conditions. Therefore, according to the present invention, there is provided a method for increasing yield in plants grown under non-stress conditions or under mild drought conditions, which method comprises increasing expression in a plant of a nucleic acid encoding a CLE-like polypeptide.

[0637] Performance of the methods of the invention gives plants grown under conditions of nutrient deficiency, particularly under conditions of nitrogen deficiency, increased yield relative to control plants grown under comparable conditions. Therefore, according to the present invention, there is provided a method for increasing yield in plants grown under conditions of nutrient deficiency, which method comprises increasing expression in a plant of a nucleic acid encoding a CLE-like polypeptide. Nutrient deficiency may result from a lack of nutrients such as nitrogen, phosphates and other phosphorous-containing compounds, potassium, calcium, cadmium, magnesium, manganese, iron and boron, amongst others.

[0638] The present invention also encompasses use of CLE-like nucleic acids in altering yield-related traits.

[0639] Nucleic acids encoding CLE-like polypeptides may find use in breeding programmes in which a DNA marker is identified which may be genetically linked to a CLE-like gene. The nucleic acids/genes may be used to define a molecular marker. This DNA marker may then be used in breeding programmes to select plants having increased yield as defined hereinabove in the methods of the invention.

[0640] Allelic variants of a CLE-like nucleic acid/gene may also find use in marker-assisted breeding programmes. Such breeding programmes sometimes require introduction of allelic variation by mutagenic treatment of the plants, using for example EMS mutagenesis; alternatively, the programme may start with a collection of allelic variants of so called “natural” origin caused unintentionally. Identification of allelic variants then takes place, for example, by PCR. This is followed by a step for selection of superior allelic variants of the sequence in question and which give increased yield. Selection is typically carried out by monitoring growth performance of plants containing different allelic variants of the sequence in question. Growth performance may be monitored in a greenhouse or in the field. Further optional steps include crossing plants in which the superior allelic variant was identified with another plant. This could be used, for example, to make a combination of interesting phenotypic features.

[0641] A CLE-like nucleic acid may also be used as probes for genetically and physically mapping the genes that they are a part of, and as markers for traits linked to those genes. Such information may be useful in plant breeding in order to develop lines with desired phenotypes. Such use of CLE-like nucleic acids requires only a nucleic acid sequence of at least 15 nucleotides in length. The CLE-like nucleic acids may be used as restriction fragment length polymorphism (RFLP) markers. Southern blots (Sambrook J, Fritsch E F and Maniatis T (1989) Molecular Cloning, A Laboratory Manual) of restriction-digested plant genomic DNA may be probed with the CLE-like nucleic acids. The resulting banding patterns may then be subjected to genetic analyses using computer programs such as MapMaker (Lander et al. (1987) Genomics 1: 174-181) in order to construct a genetic map. In addition, the nucleic acids may be used to probe Southern blots containing restriction endonuclease-treated genomic DNAs of a set of individuals representing parent and progeny of a defined genetic cross. Segregation of the DNA polymorphisms is noted and used to calculate the position of the CLE-like nucleic acid in the genetic map previously obtained using this population (Botstein et al. (1980) Am. J. Hum. Genet. 32:314-331).

[0642] The production and use of plant gene-derived probes for use in genetic mapping is described in Bernatzky and Tanksley (Plant Mol. Biol. Reporter 4: 37-41, 1986). Numerous publications describe genetic mapping of specific cDNA clones using the methodology outlined above or variations thereof. For example, F2 intercross populations, backcross populations, randomly mated populations, near isogenic lines, and other sets of individuals may be used for mapping. Such methodologies are well known to those skilled in the art.

[0643] The nucleic acid probes may also be used for physical mapping (i.e., placement of sequences on physical maps; see Hoheisel et al. In: Non-mammalian Genomic Analysis: A Practical Guide, Academic press 1996, pp. 319-346, and references cited therein).

[0644] In another embodiment, the nucleic acid probes may be used in direct fluorescence in situ hybridisation (FISH) mapping (Trask (1991) Trends Genet. 7:149-154). Although current methods of FISH mapping favour use of large clones (several kb to several hundred kb; see Laan et al. (1995) Genome Res. 5:13-20), improvements in sensitivity may allow performance of FISH mapping using shorter probes.

[0645] A variety of nucleic acid amplification-based methods for genetic and physical mapping may be carried out using the nucleic acids. Examples include allele-specific amplification (Kazazian (1989) J. Lab. Clin. Med 11:95-96), polymorphism of PCR-amplified fragments (CAPS; Sheffield et al. (1993) Genomics 16:325-332), allele-specific ligation (Landegren et al. (1988) Science 241:1077-1080), nucleotide extension reactions (Sokolov (1990) Nucleic Acid Res. 18:3671), Radiation Hybrid Mapping (Walter et al. (1997) Nat. Genet. 7:22-28) and Happy Mapping (Dear and Cook (1989) Nucleic Acid Res. 17:6795-6807). For these methods, the sequence of a nucleic acid is used to design and produce primer pairs for use in the amplification reaction or in primer extension reactions. The design of such primers is well known to those skilled in the art. In methods employing PCR-based genetic mapping, it may be necessary to identify DNA sequence differences between the parents of the mapping cross in the region corresponding to the instant nucleic acid sequence. This, however, is generally not necessary for mapping methods.

[0646] The methods according to the present invention result in plants having altered yield-related traits, as described hereinbefore. These traits may also be combined with other economically advantageous traits, such as further yield-enhancing traits, tolerance to other abiotic and biotic stresses, traits modifying various architectural features and/or biochemical and/or physiological features.

### SYR

[0647] Surprisingly, it has now been found that modulating expression in a plant of a nucleic acid encoding a SYR polypeptide gives plants, when grown under abiotic stress conditions, having enhanced yield-related traits relative to control plants. According to a first embodiment, the present invention provides a method for enhancing yield-related traits in plants grown under abiotic stress conditions, relative to control plants, comprising modulating expression in a plant of a nucleic acid encoding a SYR polypeptide.

[0648] A preferred method for modulating (preferably, increasing) expression of a nucleic acid encoding a SYR polypeptide is by introducing and expressing in a plant a nucleic acid encoding a SYR polypeptide.

[0649] Any reference hereinafter to a “protein useful in the methods of the invention” is taken to mean a SYR polypeptide as defined herein. Any reference hereinafter to a “nucleic acid useful in the methods of the invention” is taken to mean a nucleic acid capable of encoding such a SYR polypeptide. The nucleic acid to be introduced into a plant (and therefore useful in performing the methods of the invention) is any nucleic acid encoding the type of protein which will now be described, hereafter also named “SYR nucleic acid” or “SYR gene”.

[0650] The term “SYR protein or homologue thereof” as defined herein refers to a polypeptide of about 65 to about 200 amino acids, comprising (i) a leucine rich domain that resembles a leucine zipper in the C-terminal half of the protein, which leucine rich domain is (ii) preceded by a tripeptide with the sequence YFS (conserved motif 1a, SEQ ID NO: 256), or YFT (conserved motif 1b, SEQ ID NO: 257), or YFG (conserved motif 1c, SEQ ID NO: 258) or YLG (conserved motif 1d, SEQ ID NO: 259), and (iii) followed by a conserved motif 2 ((V/A/I) LAFMP (T/S), SEQ ID NO: 260). Preferably, the conserved motif 2 is (A/V) LAFMP (T/S), most preferably, the conserved motif is VLAFMPT. The “SYR protein or homologue thereof” preferably also has a conserved C-terminal peptide ending with the conserved motif 3 (SYL or PYL, SEQ ID NO: 261). The leucine rich domain of the SYR protein or its homologue is about 38 to 48 amino acids long, starting immediately behind the conserved motif 1 and stopping immediately before the conserved motif 2, and comprises at least 30% of leucine. The Leu rich domain preferably has a motif that resembles the Leucine Zipper motif (L-X₆-L-X₆-L-X₆-L, wherein X₆ is a sequence of 6 consecutive amino acids). A preferred example of a SYR protein is represented by SEQ ID NO: 252, an overview of its domains is given in FIG. 24. It should be noted that the term “SYR protein or homologue thereof” does not encompass the ARGOS protein from Arabidopsis thaliana (SEQ ID NO: 276).

[0651] Further preferably, SYR proteins have two transmembrane domains, with the N-terminal part and C-terminal part of the protein located inside and the part between the transmembrane domains located outside.

[0652] Alternatively, the homologue of a SYR protein has in increasing order of preference at least 27%, 28%, 29%, 30%, 31%, 32%, 33%, 34%, 35%, 36%, 37%, 38%, 39%, 40%, 41%, 42%, 43%, 44%, 45%, 46%, 47%, 48%, 49%, 50%, 51%, 52%, 53%, 54%, 55%, 56%, 57%, 58%, 59%, 60%, 61%, 62%, 63%, 64%, 65%, 66%, 67%, 68%, 69%, 70%, 71%, 72%, 73%, 74%, 75%, 76%, 77%, 78%, 79%, 80%, 81%, 82%, 83%, 84%, 85%, 86%, 87%, 88%, 89%, 90%, 91%, 92%, 93%, 94%, 95%, 96%, 97%, 98%, or 99% overall sequence identity to the amino acid represented by SEQ ID NO: 252, provided that the homologous protein comprises the conserved motifs 1 (a, b, c or d), 2 and 3, and the leucine rich domain as outlined above. The overall sequence identity is determined using a global alignment algorithm, such as the Needleman Wunsch algorithm in the program GAP (GCG Wisconsin Package, Accelrys), preferably with default parameters.

[0653] The term “domain” and “motif” is defined in the “definitions” section herein. Specialist databases exist for the identification of domains, for example, SMART (Schultz et al. (1998) Proc. Natl. Acad. Sci. USA 95, 5857-5864; Letunic et al. (2002) Nucleic Acids Res 30, 242-244, InterPro (Mulder et al., (2003) Nucl. Acids. Res. 31, 315-318, Prosite (Bucher and Bairoch (1994), A generalized profile syntax for biomolecular sequences motifs and its function in automatic sequence interpretation. (In) ISMB-94; Proceedings 2nd International Conference on Intelligent Systems for Molecular Biology. Altman R., Brutlag D., Karp P., Lathrop R., Searls D., Eds., pp 53-61, AAAI Press, Menlo Park; Hulo et al., Nucl. Acids. Res. 32:D134-D137, (2004), or Pfam (Bateman et al., Nucleic Acids Research 30(1): 276-280 (2002). A set of tools for in silico analysis of protein sequences is available on the ExPASy proteomics server (Swiss Institute of Bioinformatics (Gasteiger et al., ExPASy: the proteomics server for in-depth protein knowledge and analysis, Nucleic Acids Res. 31:3784-3788 (2003)). Domains may also be identified using routine techniques, such as by sequence alignment.

[0654] Methods for the alignment of sequences for comparison are well known in the art, such methods include GAP, BESTFIT, BLAST, FASTA and TFASTA. GAP uses the algorithm of Needleman and Wunsch ((1970) J Mol Biol 48: 443-453) to find the global (i.e. spanning the complete sequences) alignment of two sequences that maximizes the number of matches and minimizes the number of gaps. The BLAST algorithm (Altschul et al. (1990) J Mol Biol 215: 403-10) calculates percent sequence identity and performs a statistical analysis of the similarity between the two sequences. The software for performing BLAST analysis is publicly available through the National Centre for Biotechnology Information (NCBI). Homologues may readily be identified using, for example, the ClustalW multiple sequence alignment algorithm (version 1.83), with the default pairwise alignment parameters, and a scoring method in percentage. Global percentages of similarity and identity may also be determined using one of the methods available in the MatGAT software package (Campanella et al., BMC Bioinformatics. 2003 Jul. 10; 4:29. MatGAT: an application that generates similarity/identity matrices using protein or DNA sequences.). Minor manual editing may be performed to optimise alignment between conserved motifs, as would be apparent to a person skilled in the art. Furthermore, instead of using full-length sequences for the identification of homologues, specific domains may also be used. The sequence identity values may be determined over the entire nucleic acid or amino acid sequence or over selected domains or conserved motif(s), using the programs mentioned above using the default parameters.

[0655] Transmembrane domains are about 15 to 30 amino acids long and are usually composed of hydrophobic residues that form an alpha helix. They are usually predicted on the basis of hydrophobicity (for example Klein et al., Biochim. Biophys. Acta 815, 468, 1985; or Sonnhammer et al., In J. Glasgow, T. Littlejohn, F. Major, R. Lathrop, D. Sankoff, and C. Sensen, editors, Proceedings of the Sixth International Conference on Intelligent Systems for Molecular Biology, pages 175-182, Menlo Park, Calif., 1998. AAAI Press.).

[0656] Examples of proteins falling under the definition of “SYR polypeptide or a homologue thereof” are given in Table II of the examples section and include sequences from various monocotyledonous plants, such as rice (SEQ ID NO: 252, SEQ ID NO: 262 and SEQ ID NO: 263), corn (SEQ ID NO: 264), wheat (SEQ ID NO: 265), barley (SEQ ID NO: 266), sugarcane (SEQ ID NO: 267 and SEQ ID NO: 268), sorghum (SEQ ID NO: 269); and from dicotyledonous plants such as Arabidopsis (SEQ ID NO: 270 and SEQ ID NO: 271), grape (SEQ ID NO: 272), citrus (SEQ ID NO: 273) or tomato (SEQ ID NO: 274 and SEQ ID NO: 275). It is envisaged that the Leu rich domain is important for the function of the protein, hence proteins with the Leu rich domain but without the conserved motifs 1 or 2 may be useful as well in the methods of the present invention; examples of such proteins are given in SEQ ID NO: 284 and 285.

[0657] It is to be understood that the term “SYR polypeptide or a homologue thereof” is not to be limited to the sequence represented by SEQ ID NO: 252 or to the homologues listed as SEQ ID NO: 262 to SEQ ID NO: 275, but that any polypeptide of about 65 to about 200 amino acids meeting the criteria of comprising a leucine rich domain as defined above, preceded by the conserved tripeptide motif 1 (a, b, c or d) and followed by the conserved motif 2 and preferably also by the conserved motif 3; or having at least 38% sequence identity to the sequence of SEQ ID NO: 252, may be suitable for use in the methods of the invention.

[0658] The activity of a SYR protein or homologue thereof may be assayed by expressing the SYR protein or homologue thereof under control of a GOS2 promoter in Oryza sativa, which results in plants with increased increased biomass and/or seed yield without a delay in flowering time when grown under conditions of nitrogen deficiency and compared to corresponding wild type plants. This increase in seed yield may be measured in several ways, for example as an increase of total seed weight, number of filled seeds or Thousand Kernel Weight.

[0659] The present invention is illustrated by transforming plants with the nucleic acid sequence represented by SEQ ID NO: 251, encoding the polypeptide sequence of SEQ ID NO: 252. However, performance of the invention is not restricted to these sequences; the methods of the invention may advantageously be performed using any SYR-encoding nucleic acid or SYR polypeptide as defined herein.

[0660] Examples of nucleic acids encoding SYR polypeptides are given in Table II of Example 38 herein. Such nucleic acids are useful in performing the methods of the invention. The amino acid sequences given in Table II of Example 38 are example sequences of orthologues and paralogues of the SYR polypeptide represented by SEQ ID NO: 252, the terms “orthologues” and “paralogues” being as defined herein. Further orthologues and paralogues may readily be identified by performing a so-called reciprocal blast search. Typically, this involves a first BLAST involving BLASTing a query sequence (for example using any of the sequences listed in Table II of Example 38) against any sequence database, such as the publicly available NCBI database. BLASTN or TBLASTX (using standard default values) are generally used when starting from a nucleotide sequence, and BLASTP or TBLASTN (using standard default values) when starting from a protein sequence. The BLAST results may optionally be filtered. The full-length sequences of either the filtered results or non-filtered results are then BLASTed back (second BLAST) against sequences from the organism from which the query sequence is derived (where the query sequence is SEQ ID NO: 251 or SEQ ID NO: 252, the second BLAST would therefore be against rice sequences). The results of the first and second BLASTs are then compared. A paralogue is identified if a high-ranking hit from the first blast is from the same species as from which the query sequence is derived, a BLAST back then ideally results in the query sequence amongst the highest hits; an orthologue is identified if a high-ranking hit in the first BLAST is not from the same species as from which the query sequence is derived, and preferably results upon BLAST back in the query sequence being among the highest hits.

[0661] High-ranking hits are those having a low E-value. The lower the E-value, the more significant the score (or in other words the lower the chance that the hit was found by chance). Computation of the E-value is well known in the art. In addition to E-values, comparisons are also scored by percentage identity. Percentage identity refers to the number of identical nucleotides (or amino acids) between the two compared nucleic acid (or polypeptide) sequences over a particular length. In the case of large families, ClustalW may be used, followed by a neighbour joining tree, to help visualize clustering of related genes and to identify orthologues and paralogues.

[0662] Nucleic acid variants may also be useful in practising the methods of the invention. Examples of such variants include nucleic acids encoding homologues and derivatives of any one of the amino acid sequences given in Table II of Example 38, the terms “homologue” and “derivative” being as defined herein. Also useful in the methods of the invention are nucleic acids encoding homologues and derivatives of orthologues or paralogues of any one of the amino acid sequences given in Table II of Example 38. Homologues and derivatives useful in the methods of the present invention have substantially the same biological and functional activity as the unmodified protein from which they are derived.

[0663] Further nucleic acid variants useful in practising the methods of the invention include portions of nucleic acids encoding SYR polypeptides, nucleic acids hybridising to nucleic acids encoding SYR polypeptides, splice variants of nucleic acids encoding SYR polypeptides, allelic variants of nucleic acids encoding SYR polypeptides and variants of nucleic acids encoding SYR polypeptides obtained by gene shuffling. The terms hybridising sequence, splice variant, allelic variant and gene shuffling are as described herein.

[0664] Nucleic acids encoding SYR polypeptides need not be full-length nucleic acids, since performance of the methods of the invention does not rely on the use of full-length nucleic acid sequences. According to the present invention, there is provided a method for enhancing yield-related traits in plants, comprising introducing and expressing in a plant a portion of any one of the nucleic acid sequences given in Table II of Example 38, or a portion of a nucleic acid encoding an orthologue, paralogue or homologue of any of the amino acid sequences given in Table II of Example 38.

[0665] A portion of a nucleic acid may be prepared, for example, by making one or more deletions to the nucleic acid. The portions may be used in isolated form or they may be fused to other coding (or non-coding) sequences in order to, for example, produce a protein that combines several activities. When fused to other coding sequences, the resultant polypeptide produced upon translation may be bigger than that predicted for the protein portion.

[0666] Portions useful in the methods of the invention, encode a SYR polypeptide as defined herein, and have substantially the same biological activity as the amino acid sequences given in Table II of Example 38. Preferably, the portion is a portion of any one of the nucleic acids given in Table II of Example 38, or is a portion of a nucleic acid encoding an orthologue or paralogue of any one of the amino acid sequences given in Table II of Example 38. Preferably the portion is at least 150, 200, 250, 300, 350, 400, 450, 500, 550, 600 consecutive nucleotides in length, the consecutive nucleotides being of any one of the nucleic acid sequences given in Table II of Example 38, or of a nucleic acid encoding an orthologue or paralogue of any one of the amino acid sequences given in Table II of Example 38. Most preferably the portion is a portion of the nucleic acid of SEQ ID NO: 251. Preferably, the portion encodes encodes a polypeptide of about 65 to about 200 amino acids, comprising a leucine rich domain as defined above, preceded by the conserved tripeptide motif 1 (a, b, c or d) and followed by the conserved motif 2 and preferably also by the conserved motif 3; or having at least 38% sequence identity to the sequence of SEQ ID NO: 252.

[0667] Another nucleic acid variant useful in the methods of the invention is a nucleic acid capable of hybridising, under reduced stringency conditions, preferably under stringent conditions, with a nucleic acid encoding a SYR polypeptide as defined herein, or with a portion as defined herein.

[0668] According to the present invention, there is provided a method for enhancing yield-related traits in plants, comprising introducing and expressing in a plant a nucleic acid capable of hybridizing to any one of the nucleic acids given in Table II of Example 38, or comprising introducing and expressing in a plant a nucleic acid capable of hybridising to a nucleic acid encoding an orthologue, paralogue or homologue of any of the nucleic acid sequences given in Table II of Example 38.

[0669] Hybridising sequences useful in the methods of the invention encode a SYR polypeptide as defined herein, and have substantially the same biological activity as the amino acid sequences given in Table II of Example 38. Preferably, the hybridising sequence is capable of hybridising to any one of the nucleic acids given in Table II of Example 38, or to a portion of any of these sequences, a portion being as defined above, or wherein the hybridising sequence is capable of hybridising to a nucleic acid encoding an orthologue or paralogue of any one of the amino acid sequences given in Table II of Example 38. Most preferably, the hybridising sequence is capable of hybridising to a nucleic acid as represented by SEQ ID NO: 251 or to a portion thereof.

[0670] Preferably, the hybridising sequence encodes a polypeptide of about 65 to about 200 amino acids, comprising a leucine rich domain as defined above, preceded by the conserved tripeptide motif 1 (a, b, c or d) and followed by the conserved motif 2 and preferably also by the conserved motif 3; or having at least 38% sequence identity to the sequence of SEQ ID NO: 252.

[0671] Another nucleic acid variant useful in the methods of the invention is a splice variant encoding a SYR polypeptide as defined hereinabove, a splice variant being as defined herein.

[0672] According to the present invention, there is provided a method for enhancing yield-related traits in plants, comprising introducing and expressing in a plant a splice variant of any one of the nucleic acid sequences given in Table II of Example 38, or a splice variant of a nucleic acid encoding an orthologue, paralogue or homologue of any of the amino acid sequences given in Table II of Example 38.

[0673] Preferred splice variants are splice variants of a nucleic acid represented by SEQ ID NO: 251, or a splice variant of a nucleic acid encoding an orthologue or paralogue of SEQ ID NO: 252. Preferably, the amino acid sequence encoded by the splice variant is a polypeptide of about 65 to about 200 amino acids, comprising a leucine rich domain as defined above, preceded by the conserved tripeptide motif 1 (a, b, c or d) and followed by the conserved motif 2 and preferably also by the conserved motif 3; or having at least 38% sequence identity to the sequence of SEQ ID NO: 252.

[0674] Another nucleic acid variant useful in performing the methods of the invention is an allelic variant of a nucleic acid encoding a SYR polypeptide as defined hereinabove, an allelic variant being as defined herein.

[0675] According to the present invention, there is provided a method for enhancing yield-related traits in plants, comprising introducing and expressing in a plant an allelic variant of any one of the nucleic acids given in Table II of Example 38, or comprising introducing and expressing in a plant an allelic variant of a nucleic acid encoding an orthologue, paralogue or homologue of any of the amino acid sequences given in Table II of Example 38.

[0676] The allelic variants useful in the methods of the present invention have substantially the same biological activity as the SYR polypeptide of SEQ ID NO: 252 and any of the amino acids depicted in Table II of Example 38. Allelic variants exist in nature, and encompassed within the methods of the present invention is the use of these natural alleles. Preferably, the allelic variant is an allelic variant of SEQ ID NO: 251 or an allelic variant of a nucleic acid encoding an orthologue or paralogue of SEQ ID NO: 252. Preferably, the amino acid sequence encoded by the allelic variant is a polypeptide of about 65 to about 200 amino acids, comprising a leucine rich domain as defined above, preceded by the conserved tripeptide motif 1 (a, b, c or d) and followed by the conserved motif 2 and preferably also by the conserved motif 3; or having at least 38% sequence identity to the sequence of SEQ ID NO: 252.

[0677] Gene shuffling or directed evolution may also be used to generate variants of nucleic acids encoding SYR polypeptides as defined above; the term “gene shuffling” being as defined herein.

[0678] According to the present invention, there is provided a method for enhancing yield-related traits in plants, comprising introducing and expressing in a plant a variant of any one of the nucleic acid sequences given in Table II of Example 38, or comprising introducing and expressing in a plant a variant of a nucleic acid encoding an orthologue, paralogue or homologue of any of the amino acid sequences given in Table II of Example 38, which variant nucleic acid is obtained by gene shuffling.

[0679] Preferably, the amino acid sequence encoded by the variant nucleic acid obtained by gene shuffling is a polypeptide of about 65 to about 200 amino acids, comprising a leucine rich domain as defined above, preceded by the conserved tripeptide motif 1 (a, b, c or d) and followed by the conserved motif 2 and preferably also by the conserved motif 3; or having at least 38% sequence identity to the sequence of SEQ ID NO: 252.

[0680] Furthermore, nucleic acid variants may also be obtained by site-directed mutagenesis. Several methods are available to achieve site-directed mutagenesis, the most common being PCR based methods (Current Protocols in Molecular Biology; Wiley Eds.).

[0681] Nucleic acids encoding SYR polypeptides may be derived from any natural or artificial source. The nucleic acid may be modified from its native form in composition and/or genomic environment through deliberate human manipulation. Preferably the SYR polypeptide-encoding nucleic acid is from a plant, further preferably from a monocotyledonous plant, more preferably from the family Poaceae, most preferably the nucleic acid is from Oryza sativa.

[0682] Performance of the methods of the invention gives plants having increased abiotic stress resistance (or abiotic stress tolerance, which terms are used interchangeably), effected as enhanced yield-related traits compared to control plants when grown under abiotic stress. In particular, performance of the methods of the invention gives plants having increased yield, especially increased seed yield and increased biomass relative to control plants. The terms “yield” and “seed yield” are described in more detail in the “definitions” section herein.

[0683] Reference herein to enhanced yield-related traits is taken to mean an increase in biomass (weight) of one or more parts of a plant, which may include aboveground (harvestable) parts and/or (harvestable) parts below ground. In particular, such harvestable parts are seeds, and performance of the methods of the invention results in plants having increased seed yield relative to the seed yield of control plants.

[0684] Taking corn as an example, a yield increase may be manifested as one or more of the following: increase in the number of plants established per hectare or acre, an increase in the number of ears per plant, an increase in the number of rows, number of kernels per row, kernel weight, thousand kernel weight, ear length/diameter, increase in the seed filling rate (which is the number of filled seeds divided by the total number of seeds and multiplied by 100), among others. Taking rice as an example, a yield increase may manifest itself as an increase in one or more of the following: number of plants per hectare or acre, number of panicles per plant, number of spikelets per panicle, number of flowers (florets) per panicle (which is expressed as a ratio of the number of filled seeds over the number of primary panicles), increase in the seed filling rate (which is the number of filled seeds divided by the total number of seeds and multiplied by 100), increase in thousand kernel weight, among others.

[0685] The present invention provides a method for increasing abiotic stress resistance of plants, resulting in increased yield, especially seed yield and/or increased biomass of plants, relative to control plants, when grown under conditions of abiotic stress, which method comprises modulating expression, preferably increasing expression, in a plant of a nucleic acid encoding a SYR polypeptide as defined herein.

[0686] Since the transgenic plants according to the present invention have increased yield, it is likely that these plants exhibit an increased growth rate (during at least part of their life cycle), relative to the growth rate of control plants at a corresponding stage in their life cycle. Besides the increased yield capacity, an increased efficiency of nutrient uptake may also contribute to the increase in yield. It is observed that the plants according to the present invention show a higher efficiency in nutrient uptake. Increased efficiency of nutrient uptake allows better growth of the plant, when the plant is under stress.

[0687] The increased growth rate may be specific to one or more parts of a plant (including seeds), or may be throughout substantially the whole plant. Plants having an increased growth rate may have a shorter life cycle. The life cycle of a plant may be taken to mean the time needed to grow from a dry mature seed up to the stage where the plant has produced dry mature seeds, similar to the starting material. This life cycle may be influenced by factors such as early vigour, growth rate, greenness index, flowering time and speed of seed maturation. The increase in growth rate may take place at one or more stages in the life cycle of a plant or during substantially the whole plant life cycle. Increased growth rate during the early stages in the life cycle of a plant may reflect enhanced vigour. The increase in growth rate may alter the harvest cycle of a plant allowing plants to be sown later and/or harvested sooner than would otherwise be possible (a similar effect may be obtained with earlier flowering time). If the growth rate is sufficiently increased, it may allow for the further sowing of seeds of the same plant species (for example sowing and harvesting of rice plants followed by sowing and harvesting of further rice plants all within one conventional growing period). Similarly, if the growth rate is sufficiently increased, it may allow for the further sowing of seeds of different plants species (for example the sowing and harvesting of corn plants followed by, for example, the sowing and optional harvesting of soybean, potato or any other suitable plant). Harvesting additional times from the same rootstock in the case of some crop plants may also be possible. Altering the harvest cycle of a plant may lead to an increase in annual biomass production per acre (due to an increase in the number of times (say in a year) that any particular plant may be grown and harvested). An increase in growth rate may also allow for the cultivation of transgenic plants in a wider geographical area than their wild-type counterparts, since the territorial limitations for growing a crop are often determined by adverse environmental conditions either at the time of planting (early season) or at the time of harvesting (late season). Such adverse conditions may be avoided if the harvest cycle is shortened. The growth rate may be determined by deriving various parameters from growth curves, such parameters may be: T-Mid (the time taken for plants to reach 50% of their maximal size) and T-90 (time taken for plants to reach 90% of their maximal size), amongst others.

[0688] According to a preferred feature of the present invention, performance of the methods of the invention gives plants having an increased growth rate relative to control plants when grown under abiotic stress conditions. Therefore, according to the present invention, there is provided a method for increasing the growth rate of plants under abiotic stress conditions, which method comprises modulating expression, preferably increasing expression, in a plant of a nucleic acid encoding a SYR polypeptide as defined herein.

[0689] An increase in yield and/or growth rate occurs when the plant is exposed to various abiotic stresses compared to control plants. Plants typically respond to exposure to stress by growing more slowly. In conditions of severe stress, the plant may even stop growing altogether. Mild stress on the other hand is defined herein as being any stress to which a plant is exposed which does not result in the plant ceasing to grow altogether without the capacity to resume growth. Mild stress in the sense of the invention leads to a reduction in the growth of the stressed plants of less than 40%, 35% or 30%, preferably less than 25%, 20% or 15%, more preferably less than 14%, 13%, 12%, 11% or 10% or less in comparison to the control plant under non-stress conditions. Due to advances in agricultural practices (irrigation, fertilization, pesticide treatments) severe stresses are not often encountered in cultivated crop plants. As a consequence, the compromised growth induced by mild stress is often an undesirable feature for agriculture. Mild stresses are the everyday biotic and/or abiotic (environmental) stresses to which a plant is exposed. Abiotic stresses may be due to drought or excess water, anaerobic stress, salt stress, chemical toxicity, oxidative stress and hot, cold or freezing temperatures. The abiotic stress may be an osmotic stress caused by a water stress (particularly due to drought), salt stress, oxidative stress or an ionic stress. In a particular embodiment, the abiotic stress is the reduced availability of one or more nutrients that need to be assimilated by the plants for growth and development. Biotic stresses are typically those stresses caused by pathogens, such as bacteria, viruses, fungi and insects.

[0690] In particular, the methods of the present invention may be performed under stress conditions, preferably under conditions of reduced availability of one or more nutrients, or under conditions of mild drought to give plants having increased yield relative to control plants. As reported in Wang et al. (Planta (2003) 218: 1-14), abiotic stress leads to a series of morphological, physiological, biochemical and molecular changes that adversely affect plant growth and productivity. Drought, salinity, extreme temperatures and oxidative stress are known to be interconnected and may induce growth and cellular damage through similar mechanisms. Rabbani et al. (Plant Physiol (2003) 133: 1755-1767) describes a particularly high degree of “cross talk” between drought stress and high-salinity stress. For example, drought and/or salinisation are manifested primarily as osmotic stress, resulting in the disruption of homeostasis and ion distribution in the cell. Oxidative stress, which frequently accompanies high or low temperature, salinity or drought stress, may cause denaturing of functional and structural proteins. As a consequence, these diverse environmental stresses often activate similar cell signalling pathways and cellular responses, such as the production of stress proteins, up-regulation of anti-oxidants, accumulation of compatible solutes and growth arrest. The term “non-stress” conditions as used herein are those environmental conditions that allow optimal growth of plants. Persons skilled in the art are aware of normal soil conditions and climatic conditions for a given location.

[0691] Performance of the methods of the invention gives plants grown under abiotic stress conditions or under mild drought conditions increased yield relative to control plants grown under comparable conditions. Therefore, according to the present invention, there is provided a method for increasing yield in plants grown under abiotic stress conditions or under mild drought conditions, which method comprises increasing expression in a plant of a nucleic acid encoding a SYR polypeptide.

[0692] Performance of the methods of the invention gives plants grown under conditions of nutrient deficiency, particularly under conditions of nitrogen deficiency, increased yield relative to control plants grown under comparable conditions. Therefore, according to the present invention, there is provided a method for increasing yield in plants grown under conditions of nutrient deficiency, which method comprises increasing expression in a plant of a nucleic acid encoding a SYR polypeptide. Nutrient deficiency may result from a lack of nutrients such as nitrogen, phosphates and other phosphorous-containing compounds, potassium, calcium, cadmium, magnesium, manganese, iron and boron, amongst others.

[0693] The present invention encompasses plants or parts thereof (including seeds) obtainable by the methods according to the present invention. The plants or parts thereof comprise a nucleic acid transgene encoding a SYR polypeptide as defined above.

[0694] The invention also provides genetic constructs and vectors to facilitate introduction and/or expression in plants of nucleic acids encoding SYR polypeptides. The gene constructs may be inserted into vectors, which may be commercially available, suitable for transforming into plants and suitable for expression of the gene of interest in the transformed cells. The invention also provides use of a gene construct as defined herein in the methods of the invention.

[0695] More specifically, the present invention provides a construct comprising:
[0696] (a) a nucleic acid encoding a SYR polypeptide as defined above;
[0697] (b) one or more control sequences capable of driving expression of the nucleic acid sequence of (a); and optionally (c) a transcription termination sequence.

[0698] Preferably, the nucleic acid encoding a SYR polypeptide is as defined above. The term “control sequence” and “termination sequence” are as defined herein.

[0699] Plants are transformed with a vector comprising any of the nucleic acids described above. The skilled artisan is well aware of the genetic elements that must be present on the vector in order to successfully transform, select and propagate host cells containing the sequence of interest. The sequence of interest is operably linked to one or more control sequences (at least to a promoter).

[0700] Advantageously, any type of promoter, whether natural or synthetic, may be used to drive expression of the nucleic acid sequence. A constitutive promoter is particularly useful in the methods. See the “Definitions” section herein for definitions of the various promoter types.

[0701] It should be clear that the applicability of the present invention is not restricted to the SYR polypeptide-encoding nucleic acid represented by SEQ ID NO: 251, nor is the applicability of the invention restricted to expression of a SYR polypeptide-encoding nucleic acid when driven by a constitutive promoter.

[0702] The constitutive promoter is preferably a GOS2 promoter, preferably a GOS2 promoter from rice. Further preferably the constitutive promoter is represented by a nucleic acid sequence substantially similar to SEQ ID NO: 255 or SEQ ID NO: 58, most preferably the constitutive promoter is as represented by SEQ ID NO: 255 or SEQ ID NO: 58. See Table 2a in the “Definitions” section herein for further examples of useful constitutive promoters.

[0703] Optionally, one or more terminator sequences may be used in the construct introduced into a plant. Additional regulatory elements may include transcriptional as well as translational enhancers. Those skilled in the art will be aware of terminator and enhancer sequences that may be suitable for use in performing the invention. An intron sequence may also be added to the 5′ untranslated region (UTR) or in the coding sequence to increase the amount of the mature message that accumulates in the cytosol, as described in the definitions section. Other control sequences (besides promoter, enhancer, silencer, intron sequences, 3′UTR and/or 5′UTR regions) may be protein and/or RNA stabilizing elements. Such sequences would be known or may readily be obtained by a person skilled in the art.

[0704] The genetic constructs of the invention may further include an origin of replication sequence that is required for maintenance and/or replication in a specific cell type. One example is when a genetic construct is required to be maintained in a bacterial cell as an episomal genetic element (e.g. plasmid or cosmid molecule). Preferred origins of replication include, but are not limited to, the f1-ori and colE1.

[0705] For the detection of the successful transfer of the nucleic acid sequences as used in the methods of the invention and/or selection of transgenic plants comprising these nucleic acids, it is advantageous to use marker genes (or reporter genes). Therefore, the genetic construct may optionally comprise a selectable marker gene. Selectable markers are described in more detail in the “definitions” section herein.

[0706] It is known that upon stable or transient integration of nucleic acids into plant cells, only a minority of the cells takes up the foreign DNA and, if desired, integrates it into its genome, depending on the expression vector used and the transfection technique used. To identify and select these integrants, a gene coding for a selectable marker (such as the ones described above) is usually introduced into the host cells together with the gene of interest. These markers can for example be used in mutants in which these genes are not functional by, for example, deletion by conventional methods. Furthermore, nucleic acid molecules encoding a selectable marker can be introduced into a host cell on the same vector that comprises the sequence encoding the polypeptides of the invention or used in the methods of the invention, or else in a separate vector. Cells which have been stably transfected with the introduced nucleic acid can be identified for example by selection (for example, cells which have integrated the selectable marker survive whereas the other cells die). The marker genes may be removed or excised from the transgenic cell once they are no longer needed. Techniques for marker gene removal are known in the art, useful techniques are described above in the definitions section.

[0707] The invention also provides a method for the production of transgenic plants having, when grown under abiotic stress conditions, enhanced yield-related traits relative to control plants, comprising introduction and expression in a plant of any nucleic acid encoding a SYR polypeptide as defined hereinabove.

[0708] More specifically, the present invention provides a method for the production of transgenic plants having increased enhanced yield-related traits, particularly increased (seed) yield and/or increased biomass, which method comprises:
[0709] (i) introducing and expressing in a plant or plant cell a SYR polypeptide-encoding nucleic acid; and
[0710] (ii) cultivating the plant cell under conditions promoting plant growth and development.

[0711] The nucleic acid of (i) may be any of the nucleic acids capable of encoding a SYR polypeptide as defined herein.

[0712] The nucleic acid may be introduced directly into a plant cell or into the plant itself (including introduction into a tissue, organ or any other part of a plant). According to a preferred feature of the present invention, the nucleic acid is preferably introduced into a plant by transformation. The term “transformation” is described in more detail in the “definitions” section herein.

[0713] The genetically modified plant cells can be regenerated via all methods with which the skilled worker is familiar. Suitable methods can be found in the abovementioned publications by S. D. Kung and R. Wu, Potrykus or Höfgen and Willmitzer.

[0714] Generally after transformation, plant cells or cell groupings are selected for the presence of one or more markers which are encoded by plant-expressible genes co-transferred with the gene of interest, following which the transformed material is regenerated into a whole plant. To select transformed plants, the plant material obtained in the transformation is, as a rule, subjected to selective conditions so that transformed plants can be distinguished from untransformed plants. For example, the seeds obtained in the above-described manner can be planted and, after an initial growing period, subjected to a suitable selection by spraying. A further possibility consists in growing the seeds, if appropriate after sterilization, on agar plates using a suitable selection agent so that only the transformed seeds can grow into plants. Alternatively, the transformed plants are screened for the presence of a selectable marker such as the ones described above.

[0715] Following DNA transfer and regeneration, putatively transformed plants may also be evaluated, for instance using Southern analysis, for the presence of the gene of interest, copy number and/or genomic organisation. Alternatively or additionally, expression levels of the newly introduced DNA may be monitored using Northern and/or Western analysis, both techniques being well known to persons having ordinary skill in the art.

[0716] The generated transformed plants may be propagated by a variety of means, such as by clonal propagation or classical breeding techniques. For example, a first generation (or T1) transformed plant may be selfed and homozygous second-generation (or T2) transformants selected, and the T2 plants may then further be propagated through classical breeding techniques. The generated transformed organisms may take a variety of forms. For example, they may be chimeras of transformed cells and non-transformed cells; clonal transformants (e.g., all cells transformed to contain the expression cassette); grafts of transformed and untransformed tissues (e.g., in plants, a transformed rootstock grafted to an untransformed scion).

[0717] The present invention clearly extends to any plant cell or plant produced by any of the methods described herein, and to all plant parts and propagules thereof. The present invention extends further to encompass the progeny of a primary transformed or transfected cell, tissue, organ or whole plant that has been produced by any of the aforementioned methods, the only requirement being that progeny exhibit the same genotypic and/or phenotypic characteristic(s) as those produced by the parent in the methods according to the invention.

[0718] The invention also includes host cells containing an isolated nucleic acid encoding a SYR polypeptide as defined hereinabove. Preferred host cells according to the invention are plant cells. Host plants for the nucleic acids or the vector used in the method according to the invention, the expression cassette or construct or vector are, in principle, advantageously all plants, which are capable of synthesizing the polypeptides used in the inventive method.

[0719] The methods of the invention are advantageously applicable to any plant. Plants that are particularly useful in the methods of the invention include all plants which belong to the superfamily Viridiplantae, in particular monocotyledonous and dicotyledonous plants including fodder or forage legumes, ornamental plants, food crops, trees or shrubs. According to a preferred embodiment of the present invention, the plant is a crop plant. Examples of crop plants include soybean, sunflower, canola, alfalfa, rapeseed, cotton, tomato, potato and tobacco. Further preferably, the plant is a monocotyledonous plant. Examples of monocotyledonous plants include sugarcane. More preferably the plant is a cereal. Examples of cereals include rice, maize, wheat, barley, millet, rye, triticale, sorghum and oats.

[0720] The invention also extends to harvestable parts of a plant such as, but not limited to seeds, leaves, fruits, flowers, stems, rhizomes, tubers and bulbs. The invention furthermore relates to products derived, preferably directly derived, from a harvestable part of such a plant, such as dry pellets or powders, oil, fat and fatty acids, starch or proteins.

[0721] According to a preferred feature of the invention, the modulated expression is increased expression. Methods for increasing expression of nucleic acids or genes, or gene products, are well documented in the art and examples are provided in the definitions section.

[0722] As mentioned above, a preferred method for modulating (preferably, increasing) expression of a nucleic acid encoding a SYR polypeptide is by introducing and expressing in a plant a nucleic acid encoding a SYR polypeptide; however the effects of performing the method, i.e. enhancing yield-related traits may also be achieved using other well known techniques, including but not limited to T-DNA activation tagging, TILLING, homologous recombination. A description of these techniques is provided in the definitions section.

[0723] The present invention also encompasses use of nucleic acids encoding SYR polypeptides as described herein and use of these SYR polypeptides in enhancing any of the aforementioned yield-related traits in plants when grown under abiotic stress conditions.

[0724] Nucleic acids encoding SYR polypeptide described herein, or the SYR polypeptides themselves, may find use in breeding programmes in which a DNA marker is identified which may be genetically linked to a SYR polypeptide-encoding gene. The nucleic acids/genes, or the SYR polypeptides themselves may be used to define a molecular marker. This DNA or protein marker may then be used in breeding programmes to select plants having enhanced yield-related traits as defined hereinabove in the methods of the invention.

[0725] Allelic variants of a SYR polypeptide-encoding nucleic acid/gene may also find use in marker-assisted breeding programmes. Such breeding programmes sometimes require introduction of allelic variation by mutagenic treatment of the plants, using for example EMS mutagenesis; alternatively, the programme may start with a collection of allelic variants of so called “natural” origin caused unintentionally. Identification of allelic variants then takes place, for example, by PCR. This is followed by a step for selection of superior allelic variants of the sequence in question and which give increased yield. Selection is typically carried out by monitoring growth performance of plants containing different allelic variants of the sequence in question. Growth performance may be monitored in a greenhouse or in the field. Further optional steps include crossing plants in which the superior allelic variant was identified with another plant. This could be used, for example, to make a combination of interesting phenotypic features.

[0726] Nucleic acids encoding SYR polypeptides may also be used as probes for genetically and physically mapping the genes that they are a part of, and as markers for traits linked to those genes. Such information may be useful in plant breeding in order to develop lines with desired phenotypes. Such use of SYR polypeptide-encoding nucleic acids requires only a nucleic acid sequence of at least 15 nucleotides in length. The SYR polypeptide-encoding nucleic acids may be used as restriction fragment length polymorphism (RFLP) markers. Southern blots (Sambrook J, Fritsch EF and Maniatis T (1989) Molecular Cloning, A Laboratory Manual) of restriction-digested plant genomic DNA may be probed with the SYR-encoding nucleic acids. The resulting banding patterns may then be subjected to genetic analyses using computer programs such as MapMaker (Lander et al. (1987) Genomics 1: 174-181) in order to construct a genetic map. In addition, the nucleic acids may be used to probe Southern blots containing restriction endonuclease-treated genomic DNAs of a set of individuals representing parent and progeny of a defined genetic cross. Segregation of the DNA polymorphisms is noted and used to calculate the position of the SYR polypeptide-encoding nucleic acid in the genetic map previously obtained using this population (Botstein et al. (1980) Am. J. Hum. Genet. 32:314-331).

[0727] The production and use of plant gene-derived probes for use in genetic mapping is described in Bernatzky and Tanksley (1986) Plant Mol. Biol. Reporter 4: 37-41. Numerous publications describe genetic mapping of specific cDNA clones using the methodology outlined above or variations thereof. For example, F2 intercross populations, backcross populations, randomly mated populations, near isogenic lines, and other sets of individuals may be used for mapping. Such methodologies are well known to those skilled in the art.

[0728] The nucleic acid probes may also be used for physical mapping (i.e., placement of sequences on physical maps; see Hoheisel et al. In: Non-mammalian Genomic Analysis: A Practical Guide, Academic press 1996, pp. 319-346, and references cited therein).

[0729] In another embodiment, the nucleic acid probes may be used in direct fluorescence in situ hybridisation (FISH) mapping (Trask (1991) Trends Genet. 7:149-154). Although current methods of FISH mapping favour use of large clones (several kb to several hundred kb; see Laan et al. (1995) Genome Res. 5:13-20), improvements in sensitivity may allow performance of FISH mapping using shorter probes.

[0730] A variety of nucleic acid amplification-based methods for genetic and physical mapping may be carried out using the nucleic acids. Examples include allele-specific amplification (Kazazian (1989) J. Lab. Clin. Med. 11:95-96), polymorphism of PCR-amplified fragments (CAPS; Sheffield et al. (1993) Genomics 16:325-332), allele-specific ligation (Landegren et al. (1988) Science 241:1077-1080), nucleotide extension reactions (Sokolov (1990) Nucleic Acid Res. 18:3671), Radiation Hybrid Mapping (Walter et al. (1997) Nat. Genet. 7:22-28) and Happy Mapping (Dear and Cook (1989) Nucleic Acid Res. 17:6795-6807). For these methods, the sequence of a nucleic acid is used to design and produce primer pairs for use in the amplification reaction or in primer extension reactions. The design of such primers is well known to those skilled in the art. In methods employing PCR-based genetic mapping, it may be necessary to identify DNA sequence differences between the parents of the mapping cross in the region corresponding to the instant nucleic acid sequence. This, however, is generally not necessary for mapping methods.

[0731] The methods according to the present invention result in plants having enhanced yield-related traits, as described hereinbefore. These traits may also be combined with other economically advantageous traits, such as further yield-enhancing traits, tolerance to other abiotic and biotic stresses, traits modifying various architectural features and/or biochemical and/or physiological features.

### DESCRIPTION OF FIGURES

### ERLK

[0732] FIG. 1 gives an overview of the group of receptor kinase proteins, classified according to their extracellular region (Shiu and Bleecker, 2001). The vertical line marked as TM indicates the transmembrane domain. On the left, locus names or MAtDB names are provided of representative proteins. RLCK stands for receptor-like cytoplasmic kinase, RLK stands for receptor-like kinase. The domain names are given according to the SMART and Pfam databases.

[0733] FIG. 2 shows the domain organization of the ERLK protein used in the present invention (SEQ ID NO: 2): indicated in bold: low complexity domain, underlined: transmembrane domain, italics underlined: kinase domain. The analysis was done with SMART.

[0734] FIG. 3 gives a multiple alignment of the proteins listed as SEQ ID NO: 2, SEQ ID NO: 14, SEQ ID NO: 16, SEQ ID NO: 18, SEQ ID NO: 20, SEQ ID NO: 22, SEQ ID NO: 24, SEQ ID NO: 26, SEQ ID NO: 28, SEQ ID NO: 30, SEQ ID NO: 34, SEQ ID NO: 38, SEQ ID NO: 40, SEQ ID NO: 42, SEQ ID NO: 44, SEQ ID NO: 46, SEQ ID NO: 48, SEQ ID NO: 50, SEQ ID NO:52, SEQ ID NO: 54 and SEQ ID NO: 56. The alignment was made with CLUSTAL W (1.83), weight matrix: BLOSUM, gap opening penalty: 11, gap extension penalty: 1.

[0735] FIG. 4 shows a map of the binary plasmid p030, used for increasing expression in Oryza sativa of an Arabidopsis ERLK-encoding nucleic acid under the control of a GOS2 promoter (SEQ ID NO: 58).

### FBXW

[0736] FIG. 5 is a schematic presentation of the structure of FBXW polypeptides in plants. The relative position of the different features is shown: the F-box (PFAM PF00646), the WD40 domain (with seven individual WD40 repeats as in PFAM PF00400), and Motifs 1 to 5 as represented respectively by SEQ ID NO: 97 to 101.

[0737] FIG. 6 shows a multiple sequence alignment of plant FBXW polypeptides using CLUSTAL W (1.83) (at GenomeNet service at the Kyoto University Bioinformatics Center), and default values (Blosum 62 as weight matrix, gap open penalty of 10; gap extension penalty of 0.05). The F-box and the WD40 repeats are boxed. Motif 1 and Motif 2 are both marked by a curly bracket. Motifs 3, 4 and 5 are underlined by a black box.

[0738] FIG. 7 shows a binary vector p1017, for increased expression in Oryza sativa of an Arabidopsis thaliana nucleic acid encoding an FBXW polypeptide under the control of a GOS2 promoter (SEQ ID NO: 58).

### RANBP

[0739] FIG. 8 shows an alignment of RANBP polypeptides as defined hereinabove. The sequences were aligned using AlignX program from Vector NTI suite (InforMax, Bethesda, Md.). Multiple alignment was done with a gap opening penalty of 10 and a gap extension of 0.01. Minor manual editing was also carried out where necessary to better position some conserved regions. Motif II, III, I, IV, V, VI and VII are indicated.

[0740] FIG. 9 shows a binary vector p072, for increased expression in Oryza sativa of a Zea Mays RANBP-encoding nucleic acid under the control of a prolamin promoter (internal reference PRO0090).

[0741] FIG. 10 shows a binary vector p074, for increased expression in Oryza sativa of an Arabidopsis thaliana RANBP-encoding nucleic acid under the control of a prolamin promoter (internal reference PRO0090).

### GLK

[0742] FIG. 11 gives a graphical overview of maize and rice GLK genes (Rossini et al., 2001). The horizontal lines represent the untranslated transcribed regions (UTRs). Boxes represent different domains of the coding regions as indicated. NLS is the predicted nuclear localisation signal, DBD is the putative DNA binding domain, which comprises the GARP domain. White triangles designate position of the introns present in all four genes; black triangles designate the position of the intron that is not found in the G2 gene. Note that although OsGLK1 is predicted to have a nuclear localisation, it was not possible to predict with high confidence the presence of a NLS sequence.

[0743] FIG. 12 shows the domain organization of the GLK protein used in the present invention (SEQ ID NO: 157). The GARP domain (bold) has some resemblance to the MYB domain (indicated in italics, as identified by SMART); the GCT domain is underlined.

[0744] FIG. 13 gives a multiple alignment of the proteins listed as SEQ ID NO: 157 (OsGLK1), SEQ ID NO: 169 (OsGLK2), SEQ ID NO: 171 (AtGLK1), SEQ ID NO: 173 (AtGLK2), SEQ ID NO: 175 (PpGLK1), SEQ ID NO: 177 (PpGLK2), SEQ ID NO: 179 (ZmGLK1), SEQ ID NO: 181 (ZmG2), SEQ ID NO: 183 (TaGLK1), SEQ ID NO: 185 (AcGLK1), SEQ ID NO: 189 (SbGLK1), SEQ ID NO: 193 (OsGLKlvar). The alignment was made with CLUSTAL W (1.83), weight matrix: BLOSUM, gap opening penalty: 10, gap extension penalty: 0.05.

[0745] FIG. 14 shows a map of the binary plasmid p045, used for increasing expression in Oryza sativa of an Oryza sativa GLK-encoding nucleic acid under the control of a GOS2 promoter (SEQ ID NO: 58).

### REV ΔHDZip/START

[0746] FIG. 15 shows a phylogram of class III HDZip polypeptides. There are two monocot REV polypeptides (Oryza sativa) that cluster up with a single dicot REV polypeptide (Arabidopsis thaliana). The circle indicates the clade of REV polypeptides of which the REV nucleic acid sequences ΔHDZip/START may be useful in performing the methods of the invention. After Floyd et al. (2006) Genetics 173(1): 373-88

[0747] FIG. 16. Neighbour-joining tree output after a multiple sequence alignment of all class III HDZip polypeptides from Arabidopsis thaliana (5 in total) and Oryza sativa (5 in total), including examples of REV polypeptide orthologues and paralogues (see Example 27), using CLUSTAL W (1.83) (at GenomeNet service at the Kyoto University Bioinformatics Center), and default values (Blosum 62 as weight matrix, gap open penalty of 10; gap extension penalty of 0.05). The polypeptides of the REV branch are indicated by the curly bracket, and are separated from the other four class III HDZip polypeptides by the bold line. The circle indicates the REV branching out point.

[0748] FIG. 17 is a schematic representation of a full-length REV polypeptide. REV polypeptides comprise from N-terminus to C-terminus: (i) a homeodomain (HD) domain, for DNA binding; (ii) a leucine zipper (Zip), for protein-protein interaction; (iii) a START domain for lipid/sterol binding (comprising a miRNA complementary binding site, mir165/166), and (iv) a C-terminal region (CTR), of undefined function. For example, in one REV polypeptide from Oryza sativa as represented by SEQ ID NO: 199, the HD spans amino acids 27 to 87, the leucine zipper amino acids 91 to 127, the START domain amino acids 166 to 376 and the CTR amino acids 377 to 840.

[0749] FIG. 18 is a multiple sequence alignment of full length REV polypeptides of which the REV ΔHDZip/START nucleic acid sequences are useful in performing the methods according to the invention, using CLUSTAL W (1.83) (at GenomeNet service at the Kyoto University Bioinformatics Center), and default values (Blosum 62 as weight matrix, gap open penalty of 10; gap extension penalty of 0.05). The homeodomain, the leucine zipper, the START domain and the CTR are heavily boxed.

[0750] FIG. 19 is a multiple sequence alignment of the CTR of REV polypeptides (both full length and partial polypeptides, as listed in Example 27), of which the REV ΔHDZip/START nucleic acid sequences are useful in performing the methods according to the invention, using CLUSTAL W (1.83) (at GenomeNet service at the Kyoto University Bioinformatics Center), and default values (Blosum 62 as weight matrix, gap open penalty of 10; gap extension penalty of 0.05

[0751] FIG. 20 represents the binary vectors p0443 and p0448 for reduction of an endogenous REV gene expression in Oryza sativa, using respectively the REV ΔHDZip/START nucleic acid sequence as represented by SEQ ID NO: 194 (encoding a partial CTR from a REV polypeptide) and the REV nucleic acid sequence as represented by SEQ ID NO: 198 (encoding the entire REV polypeptide). The nucleic acid sequences are cloned as inverted repeats separated by a non-coding region (here a partial matrix attachment region (MAR) from tobacco) with the aim of obtaining an mRNA with a hairpin conformation. A constitutive promoter (PRO0129) controls the expression of both nucleic acid sequences SEQ ID NO: 194 and SEQ ID NO: 198 in the two different plasmids.

### CLE

[0752] FIG. 21 shows the domain organisation of the CLE-like polypeptide of SEQ ID NO: 233: in italics: signal sequence, the conserved Arg residue needed for proteolytic processing is indicated in bold (here Arg73), the CLE domain is underlined.

[0753] FIG. 22. gives a multiple alignment of CLE-like polypeptides: a single dot below the sequence alignment indicates a less conserved substitution, a colon indicates a conserved substitution, an asterisk indicates a conserved residue in all sequences.

[0754] FIG. 23 represents the binary vector p068 for endogenous gene silencing in Oryza sativa, preferentially using the nucleic acid sequence encoding a CLE-like polypeptide, or a part thereof, using a hairpin construct under the control of an endosperm-specific promoter (PRO90).

### SYR NUE

[0755] FIG. 24 gives an overview of the conserved motifs present in SEQ ID NO: 252. The leucine rich domain is underlined, the conserved motifs 1, 2 and 3 are indicated in bold and the sequence in italics represents the putative N-glycosylation site with the putative protein kinase C phosphorylation site.

[0756] FIG. 25 shows a multiple alignment of various SYR proteins. The asterisks indicate identical amino acid residues, the colons represent highly conserved substitutions and the dots represent less conserved substitutions. With the information from FIG. 1, the various domains and conserved motifs in SEQ ID NO: 252 can be easily identified in the other SYR proteins.

[0757] FIG. 26 shows binary vector pGOS2::SYR for transformation and expression in Oryza sativa of an Oryza sativa SYR nucleic acid under the control of a rice GOS2 promoter.

[0758] FIG. 27 details examples of sequences useful in performing the methods according to the present invention, or useful in isolating such sequences. Sequences may result from public EST assemblies, with lesser quality sequencing. As a consequence, a few nucleic acid substitutions may be expected. Both 5′ and 3′ UTRs may also be used for the performing the methods of the invention. SEQ ID NO: 1 to SEQ ID NO: 58 relate to ERLK; SEQ ID NO: 58 to SEQ ID NO: 112 relate to FBXWD40; SEQ ID NO: 113 to SEQ ID NO: 155 relate to RANBP; SEQ ID NO: 156 to SEQ ID NO: 193 and SEQ ID NO: 58 relate to GLK; SEQ ID NO: 194 to SEQ ID NO: 231 and SEQ ID NO: 58 relate to REV ΔHDZip/START; SEQ ID NO: 232 to SEQ ID NO: 250 relate to CLE; SEQ ID NO: 58 and SEQ ID NO: 251 to SEQ ID NO: 292 relate to SYR. SEQ ID NO: 276 represents the ARGOS protein sequence (GenBank accession AY305869).

### EXAMPLES

[0759] The present invention will now be described with reference to the following examples, which are by way of illustration alone. The following examples are not intended to completely define or otherwise limit the scope of the invention.

[0760] DNA manipulation: unless otherwise stated, recombinant DNA techniques are performed according to standard protocols described in (Sambrook (2001) Molecular Cloning: a laboratory manual, 3rd Edition Cold Spring Harbor Laboratory Press, CSH, New York) or in Volumes 1 and 2 of Ausubel et al. (1994), Current Protocols in Molecular Biology, Current Protocols. Standard materials and methods for plant molecular work are described in Plant Molecular Biology Labfax (1993) by R. D. D. Croy, published by BIOS Scientific Publications Ltd (UK) and Blackwell Scientific Publications (UK).

### Example 1

### Identification of Homologues of the ERLK Protein of SEQ ID NO: 2 in Arabidopsis, Rice and Other Plant Species

[0761] Sequences (full length cDNA, ESTs or genomic) related to the nucleic acid sequence used in the methods of the present invention were identified amongst those maintained in the Entrez Nucleotides database at the National Center for Biotechnology Information using database sequence search tools, such as the Basic Local Alignment Tool (BLAST) (Altschul et al. (1990) J. Mol. Biol. 215:403-410; and Altschul et al. (1997) Nucleic Acids Res. 25:3389-3402). This program is typically used to find regions of local similarity between sequences by comparing nucleic acid or polypeptide sequences to sequence databases and by calculating the statistical significance of matches. The polypeptide encoded by the nucleic acid of the present invention was used with the TBLASTN algorithm, with default settings and the filter for ignoring low complexity sequences was set off. The output of the analysis was viewed by pairwise comparison, and ranked according to the probability score (E-value), where the score reflect the probability that a particular alignment occurs by chance (the lower the E-value, the more significant the hit). In addition to E-values, comparisons were also scored by percentage identity. Percentage identity refers to the number of identical nucleotides (or amino acids) between the two compared nucleic acid (or polypeptide) sequences over a particular length. In some instances, the default parameters may be adjusted to modify the stringency of the search.

[0762] Rice sequences and EST sequences from various plant species may also be obtained from other databases, such as KOME (Knowledge-based Oryza Molecular biological Encyclopedia; Kikuchi et al., Science 301, 376-379, 2003), Sputnik (Rudd, S., Nucleic Acids Res., 33: D622-D627, 2005) or the Eukaryotic Gene Orthologs database (EGO, hosted by The Institute for Genomic Research). These databases are searchable with the BLAST tool. SEQ ID NO: 11 to SEQ ID NO: 56 are nucleic acid and protein sequences of homologues of SEQ ID NO: 2 and were obtained from the above-mentioned databases using SEQ ID NO: 2 as a query sequence.

TABLE A
Nucleic acid sequences related to the nucleic acid sequence
(SEQ ID NO: 1) useful in the methods of the present invention,
and the corresponding deduced polypeptides.

| | Nucleic acid | |
|---|---|---|
| Plant Source | SEQ ID NO: | Protein SEQ ID NO: |
| Arabidopsis thaliana ERLK | 1 | 2 |
| Arabidopsis thaliana AAC64891 | 11 | 12 |
| Arabidopsis thaliana NM_104355.2 | 13 | 14 |
| Arabidopsis thaliana At3g58690 | 15 | 16 |
| Arabidopsis thaliana At3g58690 | 17 | 18 |
| Arabidopsis thaliana At4g02010 | 19 | 20 |
| Arabidopsis thaliana At5g56890 | 21 | 22 |
| Arabidopsis thaliana AT2G20300 | 23 | 24 |
| Oryza sativa Osi093820.1 | 25 | 26 |
| Oryza sativa Osi015947.1 | 27 | 28 |
| Oryza sativa Osi003977.2 | 29 | 30 |
| Oryza sativa Osi003977 | 31 | 32 |
| Oryza sativa Osi000040.5 | 33 | 34 |
| Oryza sativa Ozsa8316 | 35 | 36 |
| Oryza sativa Osi001397.3 | 37 | 38 |
| Oryza sativa Osi000142.1 | 39 | 40 |
| Oryza sativa Osi009054.1 | 41 | 42 |
| Oryza sativa Osi001078.4 | 43 | 44 |
| Saccharum officinarum TC15181 | 45 | 46 |
| Glycine max TC196912 | 47 | 48 |
| Solanum tuberosum TC81885 | 49 | 50 |
| Nicotiana tabacum coi2 | 51 | 52 |
| Medicago truncatula ABE82646.1 | 53 | 54 |
| Populus sp TC25047 | 55 | 56 |

### Example 2

### Determination of Global Similarity and Identity Between the Kinase Domains of ERLK Proteins

[0763] Percentages of similarity and identity between the kinase domains of ERLK proteins were determined using MatGAT (Matrix Global Alignment Tool) software (BMC Bioinformatics. 2003 4:29. MatGAT: an application that generates similarity/identity matrices using protein or DNA sequences. Campanella J J, Bitincka L, Smalley J; software hosted by Ledion Bitincka). MatGAT software generates similarity/identity matrices for DNA or protein sequences without needing pre-alignment of the data. The program performs a series of pair-wise alignments using the Myers and Miller global alignment algorithm (with a gap opening penalty of 12, and a gap extension penalty of 2), calculates similarity and identity using for example Blosum 62 (for polypeptides), and then places the results in a distance matrix. Sequence similarity is shown in the bottom half of the dividing line and sequence identity is shown in the top half of the diagonal dividing line. The sequence of SEQ ID NO: 2 is indicated as number 1 in the matrix.

[0764] Results of the software analysis are shown in Table C for the global similarity and identity over the kinase domains of the ERLK polypeptides. The kinase domains were delineated using the SMART tool and the obtained sequences are listed in Table B. Percentage identity is given above the diagonal (in bold) and percentage similarity is given below the diagonal (normal font). Percentage identity between kinase domains of ERLK paralogues and orthologues of CDS845 (SEQ ID NO: 2) ranges between 30% and 68.8%.

TABLE B

sequences of the kinase domains as obtained
upon analysis with SMART and used in the
MATGAT analysis:

| | |
|---|---|
| CDS0845 | FSEEKKIGNGDVYKGVLSDGTVAAIKKLHMFNDNASNQK |
| | HEERSFRLVQRSTSRLQCPYLVELLGYCADQNHRILIYE |
| | FMPNGTVEHHLHDHNFKNLKDRPQPLDWGARLRIALDCA |
| | RALEFLHENTISTVIHRNFKCTNILLDQNNRAKVSDFGL |
| | AKTGSDKLNGEISTRVIGTTGYLAPEYASTGKLTTKSDV |
| | YSYGIVLLQLLTGRTPIDSRRPRGQDVLVSWALPRLTNR |
| | EKISEMVDPTMKGQYSQKDLIQVAAIAAVCVQPEASYRP |
| | LMTDVVHSL |
| NP_175879 | FSEEKKIGNGDVYKGVLSDGTVAAIKKLHMFNDNASNQK |
| | HEERSFRLEVDLLSRLQCPYLVELLGYCADQNHRILIYE |
| | FMPNGTVEHHLHDHNFKNLKDRPQPLDWGARLRIALDCA |
| | RALEFLHENTISTVIHRNFKCTNILLDQNNRAKVSDFGL |
| | AKTGSDKLNGEISTRVIGTTGYLAPEYASTGKLTTKSDV |
| | YSYGIVLLQLLTGRTPIDSRRPRGQDVLVSWALPRLTNR |
| | EKISEMVDPTMKGQYSQKDLIQVAAIAAVCVQPEASYRP |
| | LMTDVVHSL |
| AT3G58690 | FSKSNVVGNGGFGLVYRGVLNDGRKVAIKLMDHAGKQGE |
| | EEFKMEVELLSRLRSPYLLALLGYCSDNSHKLLVYEFMA |
| | NGGLQEHLYLPNRSGSVPPRLDWETRMRIAVEAAKGLEY |
| | LHEQVSPPVIHRDFKSSNILLDRNFNAKVSDFGLAKVGS |
| | DKAGGHVSTRVLGTQGYVAPEYALTGHLTTKSDVYSYGV |
| | VLLELLTGRVPVDMKRATGEGVLVSWALPQLADRDKVVD |
| | IMDPTLEGQYSTKEVVQVAAIAAMCVQAEADYRPLMADV |
| | VQSL |
| At3g58690 | FSKSNVVGNGGFGLVYRGVLNDGRKVAIKLMDHAGKQGE |
| | EEFKMEVELLSRLRSPYLLALLGYCSSDNSHKLLVYEFM |
| | ANGGLQEHLYLPNRSGSVPPRLDWETRMRIAVEAAKGLE |
| | YLHEQVSPPVIHRDFKSSNILLDRNFNAKVSDFGLAKVG |
| | SDKAGGHVSTRVLGTQGYVAPEYALTGHLTTKSDVYSYG |
| | VVLLELLTGRVPVDMKRATGEGVLVSWALPQLADRDKVV |
| | DIMDPTLEGQYSTKEVVQVAAIAAMCVQAEADYRPLMAD |
| | VVQSL |
| AT4G02010 | FESASILGEGGFGKVYRGILADGTAVAIKKLTSGGPQGD |
| | KEFQVEIDMLSRLHHRNLVKLVGYYSSRDSSQHLLCYEL |
| | VPNGSLEAWLHGPLGLNCPLDWDTRMKIALDAARGLAYL |
| | HEDSQPSVIHRDEKASNILLENNFNAKVADFGLAKQAPE |
| | GRGNHLSTRVMGTFGYVAPEYAMTGHLLVKSDVYSYGVV |
| | LLELLTGRKPVDMSQPSGQENLVTWTRPVLRDKDRLEEL |
| | VDSRLEGKYPKEDFIRVCTIAAACVAPEASQRPTMGEVV |
| | QSL |
| At5g56890 | FDESRVLGEGGFGRVYEGVFDDGTKVAVKVLKRDDQQGS |
| | REFLAEVEMLSRLHHRNLVNLIGICIEDRNRSLVYELIP |
| | NGSVESHLHGIDKASSPLDWDARLKIALGAARGLAYLHE |
| | DSSPRVIHRDFKSSNILLENDFTPKVSDFGLARNALDDE |
| | DNRHISTRVMGTFGYVAPEYAMTGHLLVKSDVYSYGVVL |
| | LELLTGRKPVDMSQPPGQENLVSWTRPFLTSAEGLAAII |
| | DQSLGPEISFDSIAKVAAIASMCVQPEVSHRPFMGEVVQ |
| | AL |
| AT2G20300 | FSAKRVLGEGGFGRVYQGSMEDGTEVAVKLLTRDNQNRD |
| | REFIAEVEMLSRLHHRNLVKLIGICIEGRTRCLIYELVH |
| | NGSVESHLHEGTLDWDARLKIALGAARGLAYLHEDSNPR |
| | VIHRDFKASNVLLEDDFTPKVSDFGLAREATEGSQHIST |
| | RVMGTFGYVAPEYAMTGHLLVKSDVYSYGVVLLELLTGR |
| | RPVDMSQPSGEENLVTWARPLLANREGLEQLVDPALAGT |
| | YNFDDMAKVAAIASMCVHQEVSHRPFMGEVVQAL |
| Osi015947 | FSECNVVGRGAYGVVFRGRLGDGTTAAIKRLKMDGRREG |
| | EREFRIEMGVAITAQVDLLSRMHSPYLVGLLGYCADQSH |
| | RLLVFEFMPNGSLKSHLHRRALAPAEQPPPLDWQTRLGI |
| | ALDCARALEFLHEHSSPAVIHRDFKCSNILLDHNYRARV |
| | SDFGMAKLGSNKANGQVAAITAMOIQIKADYRELMIDVV |
| | QSL |
| Osi003977 | FGRAHVVGQGSFGAVYRGVLPDGRKVAVKLMDRPGKQGE |
| | EEFEMEVELLSRLRSPYLLGLIGHCSEGGHRLLVYEFMA |
| | NGGLQEHLYPNGAFEKIETFSIYLVKQRPIFDKNIGHPI |
| | CRRAHFSRQLISHKADIVGSCGGISKLDWPTRMRIALEA |
| | AKGLEYLHERVNPPVIHRDFKSSNILLDKDFRARVSDFG |
| | LAKLGSDRAGGHVSTRVLGTQGYVAPDYGVVLLELLTGR |
| | VPVDMKRPPGEGVLVNWALPMLTDREKVVQILDPALEGQ |
| | YSLKDAVQVAAIAAMCVQQEADYRPLMADVVQSL |
| Osi000040a | FDPSSMLGEGGFGRVFKGVLTDGTAVAIKKLTSGGHQGD |
| | KEFLVEVEMLSRLHHRNLVKLIGYYSNRTLGASRPLDWD |
| | TRMRIALDAARGLAYLHEDSQPCVIHRDFKASNILLEDD |
| | FHAKVSDFGLAKQAPEGRTNYLSTRVMGTFGYVAPEYAM |
| | TGHLLVKSDVYSYGVVLLELLTGRRPVDMSQPSGQENLV |
| | TWLTQMFPDLSTKSLVSHQPLLAKLSGVEILICSILTTQ |
| | ARPILRDKDTLEELADPKLGGQYPKDDFVRVCTIAAACV |
| | SPEASQRPTMGEVVQSL |
| Osi000040b | FSNDLAIGVGGFGVVYRGVVDGDVKVAVKRSNPSSEQGI |
| | TEFQTEVEMLSKLRHRHLVSLIGFCEEDGEMVLVYDYME |
| | HGTLREHLYHNGGKPTLSWRHRLDICIGAARGLHYLHTG |
| | ESHVSTVVKGSFGYLDPEYYRRQQLTDKSDVYSFGVVLF |
| | EVLMARPALDPALPRDQVSLADYALACKRGGALPDVVDP |
| | AIRDQIAPECLAKFADTAEKCLSENGTERPTMGDVLWNL |
| Osi001397 | FDNSRIIGEGGFGRVYEGILEDGERVAVKILKRDDQQGT |
| | REFLAEVEMLSRLHHRNLVKLIGICTEEHIRCLVYELVP |
| | NGSVESHLHGSDKGTAPLYWDARLKIALGAARALAYLHE |
| | DSSPRVIHRDFKSSNILLEHDFTPKVSDFGLARTAIGEG |
| | NEHISTRVMGTFGYVAPEYAMTGHLLVKSDVYSYGVVLL |
| | ELLTGRKPVDILRPPGQENLVAWACPFLTSRDGLETIID |
| | PSLGNSILFDSIAKVAAIASMCVQPEVDQRPFMGEVVQA |
| | L |
| Osi000142 | FDDSTVLGEGGFGCVYQGTLEDGTRVAVKVLKRYDGQGE |
| | REFLAEVEMLGRLHHRNLVKLLGICVEENARCLVYELIP |
| | NGSVESHLHGVDLETAPLDWNARMKIALGAARALAYLHE |
| | DSSPCVIHRDFKSSNILLEHDFTPKVSDFGLARTARGEG |
| | NQHISTRVMGTFGYVAPEYAMTGHLLVKSDVYSYGVVLL |
| | ELLTGRKPVDMSRPGGQENLVSWARPLLTNVVSLRQAVD |
| | PLLGPNVPLDNVAKAAAIASMCVQPEVAHRPSMGEVVQA |
| | L |
| Osi009054 | FDSKRVLGQGGFGRVYHGTMDGGDEIAVKLLTREDRSGD |
| | REFIAEVEMLSRLHHRNLVKLIGICIEHNKRCLVYELIR |
| | NGSVESHLHGADKAKGMLNWDVRMKIALGAARGLAYLHE |
| | DSNPHVIHRDFKGSNILLEEDFTPKVTDFGLAREATNGI |
| | QPISTRVMGTFGYVAPEYAMTGHLLVKSDVYSYGVVLLE |
| | LLSGRKPVCMSDTNGPQNLVTWARPLLCHKEGLERLIDP |
| | SLNGNFNFDDVAKVASIASMCVHNDPSQRPFMGEVVQAL |
| Osi001078 | ESENKIIGEGGYGRVYRGTIDDEVDVAVKLLTRKHQNRD |
| | REFIAEVEMLSRLHHRNLVKLIGICIERSTRCLVFELVP |
| | NGSVESHLHGSDKIYGPLDFDTRMKIALGAARGLAYLHE |
| | DANPHVIHRDFKASNVLLENDFTPKVADFGLAKEASEGM |
| | DHISTQVMGTFGYVAPEYAMTGHLLVKSDVYSYGVVLLE |
| | LLSGRKPVDMTQPPGSENLVTWARPLLTDRDGLQQLVDP |
| | SMPAASYGFEKLAKAAAIASMCVHVEASHRPFMGEVVQA |
| | L |
| TC15181 | FGRAHMVGQGSFGAVYRGVLPDGRKVAVKLMDRPGKQGE |
| | EEFEMEVELLSRLRSPYLLGLIGHCSEGGHRLLVYEFMA |
| | NGGLQEHLYPNRGSCGGISKLDWDTRMRIALEAAKGLEY |
| | LHERVNPPVIHRDFKSSNILLDKDFHARVSDFGLTKLGS |
| | DRAGGHVSTRVLGTQGYVAPEYALTGHLTTKSDVYSYGV |
| | VLLELLTGRVPVDMKRPPGEGVLVNWALPMLTDREKVVR |
| | ILDPALEGQYSLKDAVQVAAIAAMCVQPEADYRPLMADV |
| | VQSL |
| TC196912 | SKSNVIGHGGFGLVYRGVLNDGRKVAIKFMDQAGKQGEE |
| | EFKVEVELLSRLHSPYLLALLGYCSDSNHKLLVYEFMAN |
| | GGLQEHLYPVSNSIITPVKLDWETRLRIALEAAKGLEYL |
| | HEHVSPPVIHRDEKSSNILLDKKFHAKVSDFGLAKLGPD |
| | RAGGHVSTRVLGTQGYVAPEYALTGHLTTKSDVYSYGVV |
| | LLELLTGRVPVDMKRPPGEGVLVSWALPLLTDREKVVKI |
| | MDPSLEGQYSMKEVVQVAAIAAMCVQPEADYRPLMADVV |
| | QSL |
| TC81885 | EEEFKVEVELLCRLRSPYLLSLIGYCSESSHKLLVYEFM |
| | ANGGLQEHLYPIKGSNNCCPKLDWKTRLRIALEAAKGLE |
| | YLHEHVNPPIIHRDLKSSNILLDKNFHAKVSDFGLAKLG |
| | SDKAGGHVSTRVLGTQGYVAPEYALTGHLTTKSDVYSYG |
| | VVLLELLTGRVPVDMKRSPGEGVLVSWALPRLTDREKVV |
| | EIMDPALEGQYSMKEVIQVAAIAAMCVQPEADYRPLMAD |
| | VVQSL |
| ABB36644 | FSLKRVLGEGGFGRVYHGILEDRTEVAVKVLTRDNQNGD |
| | REFIAEVEMLSRLHHRNLVKLIGICSEERIRSLVYELVR |
| | NGSVESHLHGRDGRKEPLDWDVRLKIALGAARGLAYLHE |
| | DSNPRVIHRDFKASNVLLEDDFTPKVADFGLAREATEGS |
| | HHISTRVMGTFGYVAPEYAMTGHLLVKSDVYSYGVVLLE |
| | LLSGRKPVDMSQPPGEENLVTWARPLLTTREGLEQLVDP |
| | SLAGSYDFDDMAKVAAIASMCVHPEVTQRPFMGEVVQAL |
| ABE82646 | MLSRLHHRNLVKLIGICIEGRRRCLVYELVPNGSVESHL |
| | HGDDKNRGPLDWEARMKIALGAARGLAYLHEDSNPRVIH |
| | RDFKASNVLLEDDFTPKVSDFGLAREATEGSNHISTRVM |
| | GTFGYVAPEYAMTGHLLVKSDVYSYGVVLLELLTGRKPV |
| | DMSQPQGQENLVTWARALLTSREGLEQLVDPSLAGGYNF |
| | DDMAKVAAIASMCVHSEVTQRPFMGEVVQAL |
| Popsp | VTWNEGYGVVYGGTLSDGTVAAIKMLHRAGKQGERAFRI |
| | EVDLLSRLHSPYLVELLGYCADQNHRLLVFEFMPNGTLQ |
| | HHLHHKQYRPLDWGTRLRIALDCARALEFLHELTIPAVI |
| | HRDFKCSNILLDQNFRAKVSDFGSAKMGSERINARNSMC |
| | LPSTTGYLAPEHASTGKLTTKSDVYSYGVVLLQLLTGRK |
| | PVDTKQPSGEHVLVSWALPRLTNRDKVVEMVDPAMQDQY |
| | SKKDLIQVAAIAAVCVQPEADYRPLMTDVVQSL |

TABLE C

| | Ident | | | | | | | | | | |
|---|---|---|---|---|---|---|---|---|---|---|---|
| Sim | 1 | 2 | 3 | 4 | 5 | 6 | 7 | 8 | 9 | 10 | 11 |
| 1. CDS0845 | | 98.2 | 57.5 | 57.5 | 47.7 | 48.3 | 47.7 | 39.2 | 44.8 | 40.7 | 30.0 |
| 2. NP_175879 | 98.2 | | 58.9 | 58.9 | 48.8 | 49.3 | 48.8 | 41.0 | 46.0 | 41.6 | 31.0 |
| 3. At3g58690 | 74.8 | 76.6 | | 100.0 | 56.3 | 54.0 | 52.3 | 40.8 | 65.6 | 47.5 | 35.4 |
| 4. At3g58690s | 74.8 | 76.6 | 100.0 | | 56.3 | 54.0 | 52.3 | 40.8 | 65.6 | 47.5 | 35.4 |
| 5. At4g02010 | 66.0 | 67.7 | 73.6 | 73.6 | | 64.0 | 64.9 | 33.2 | 42.6 | 68.4 | 32.6 |
| 6. At5g56890 | 64.5 | 66.3 | 70.8 | 70.8 | 75.7 | | 76.4 | 33.7 | 44.9 | 56.1 | 37.2 |
| 7. At2g20300 | 64.9 | 66.7 | 70.8 | 70.8 | 76.4 | 84.7 | | 30.4 | 44.1 | 58.2 | 37.7 |
| 8. Osi015947 | 50.4 | 52.1 | 53.4 | 53.4 | 47.8 | 48.0 | 47.4 | | 35.8 | 26.9 | 27.3 |
| 9. Osi003977 | 63.5 | 65.1 | 76.9 | 76.9 | 60.3 | 59.0 | 59.3 | 48.2 | | 38.7 | 28.9 |
| 10. Osi000040a | 58.6 | 60.3 | 64.1 | 64.1 | 82.4 | 67.9 | 70.0 | 39.3 | 56.7 | | 29.4 |
| 11. Osi000040b | 46.1 | 47.9 | 51.6 | 51.6 | 48.6 | 49.8 | 51.5 | 43.2 | 42.0 | 42.8 | |
| 12. Osi001397 | 64.2 | 66.0 | 69.7 | 69.7 | 75.0 | 89.5 | 84.7 | 46.7 | 58.3 | 66.2 | 50.4 |
| 13. Osi000142 | 64.5 | 66.3 | 67.1 | 67.1 | 76.1 | 86.5 | 82.5 | 48.2 | 57.7 | 68.3 | 48.2 |
| 14. Osi009054 | 62.1 | 63.8 | 69.0 | 69.0 | 73.9 | 80.7 | 88.6 | 44.7 | 57.7 | 67.9 | 50.5 |
| 15. Osi001078 | 65.6 | 67.4 | 70.4 | 70.4 | 76.4 | 82.2 | 89.4 | 46.0 | 59.3 | 69.3 | 49.3 |
| 16. TC15181 | 71.3 | 73.0 | 91.0 | 91.0 | 71.8 | 69.7 | 70.0 | 50.9 | 83.7 | 63.8 | 49.1 |
| 17. TC196912 | 74.1 | 75.9 | 92.4 | 92.4 | 75.0 | 71.4 | 70.7 | 53.3 | 77.5 | 64.8 | 50.4 |
| 18. TC81885 | 66.0 | 67.7 | 80.9 | 80.9 | 63.8 | 60.7 | 63.4 | 49.8 | 67.1 | 54.5 | 48.1 |
| 19. ABB36644 | 66.0 | 67.7 | 70.0 | 70.0 | 77.9 | 85.8 | 91.6 | 46.2 | 59.3 | 71.0 | 51.6 |
| 20. ABE82646 | 59.2 | 59.2 | 59.2 | 59.2 | 65.9 | 72.0 | 78.4 | 43.4 | 50.2 | 58.6 | 48.7 |
| 21. Popsp | 78.7 | 80.5 | 76.5 | 76.5 | 67.4 | 65.1 | 68.3 | 55.4 | 63.8 | 59.0 | 49.4 |

| | Ident | | | | | | | | | |
|---|---|---|---|---|---|---|---|---|---|---|
| Sim | 12 | 13 | 14 | 15 | 16 | 17 | 18 | 19 | 20 | 21 |
| 1. CDS0845 | 47.7 | 48.8 | 42.0 | 45.7 | 54.7 | 58.6 | 51.8 | 47.0 | 42.9 | 68.8 |
| 2. NP_175879 | 48.8 | 49.8 | 43.0 | 46.7 | 56.1 | 60.0 | 53.2 | 48.1 | 43.3 | 70.6 |
| 3. At3g58690 | 53.8 | 54.2 | 48.7 | 51.1 | 81.0 | 87.0 | 73.6 | 52.7 | 44.0 | 61.6 |
| 4. At3g58690s | 53.8 | 54.2 | 48.7 | 51.1 | 81.0 | 87.0 | 73.6 | 52.7 | 44.0 | 61.6 |
| 5. At4g02010 | 63.1 | 63.2 | 61.2 | 65.0 | 54.5 | 56.1 | 49.1 | 67.4 | 58.0 | 52.5 |
| 6. At5g56890 | 83.3 | 78.9 | 73.1 | 71.7 | 56.5 | 56.8 | 48.2 | 78.2 | 66.9 | 50.2 |
| 7. At2g20300 | 75.5 | 74.1 | 77.7 | 78.1 | 54.9 | 53.1 | 47.3 | 87.5 | 74.0 | 49.8 |
| 8. Osi015947 | 33.8 | 34.0 | 29.7 | 30.3 | 37.6 | 40.1 | 33.1 | 30.8 | 24.5 | 46.0 |
| 9. Osi003977 | 44.1 | 43.8 | 41.9 | 42.7 | 78.9 | 66.1 | 59.0 | 44.4 | 38.2 | 49.1 |
| 10. Osi000040a | 53.7 | 54.3 | 53.7 | 52.9 | 48.4 | 48.1 | 40.8 | 57.2 | 48.9 | 45.0 |
| 11. Osi000040b | 38.0 | 35.3 | 36.0 | 37.7 | 36.5 | 35.0 | 29.6 | 38.0 | 29.9 | 30.8 |
| 12. Osi001397 | | 80.7 | 71.5 | 72.7 | 56.3 | 56.3 | 48.0 | 78.5 | 67.2 | 50.7 |
| 13. Osi000142 | 87.6 | | 71.2 | 69.8 | 54.5 | 56.0 | 46.9 | 74.8 | 65.0 | 51.8 |
| 14. Osi009054 | 82.1 | 79.6 | | 72.6 | 52.0 | 50.2 | 44.0 | 78.8 | 67.0 | 44.9 |
| 15. Osi001078 | 83.2 | 83.2 | 86.1 | | 53.6 | 52.5 | 46.4 | 79.6 | 68.2 | 50.5 |
| 16. TC15181 | 69.7 | 68.6 | 67.5 | 69.7 | | 82.3 | 74.4 | 56.0 | 47.5 | 60.3 |
| 17. TC196912 | 70.3 | 68.5 | 68.8 | 72.1 | 91.0 | | 77.2 | 54.9 | 46.4 | 63.8 |
| 18. TC81885 | 60.6 | 59.5 | 60.4 | 62.8 | 79.8 | 81.5 | | 48.0 | 51.9 | 57.0 |
| 19. ABB36644 | 85.8 | 81.8 | 87.9 | 88.3 | 70.8 | 70.7 | 61.9 | | 74.4 | 50.2 |
| 20. ABE82646 | 71.5 | 69.3 | 74.0 | 74.8 | 59.6 | 59.4 | 67.8 | 77.7 | | 43.9 |
| 21. Popsp | 66.4 | 65.7 | 64.8 | 68.6 | 74.0 | 77.5 | 70.8 | 67.4 | 59.2 | |

### Example 3

### Cloning of the Nucleic Acid Sequence Used in the Methods of the Invention

[0765] DNA manipulation: unless otherwise stated, recombinant DNA techniques are performed according to standard protocols described in (Sambrook (2001) Molecular Cloning: a laboratory manual, 3rd Edition Cold Spring Harbor Laboratory Press, CSH, New York) or in Volumes 1 and 2 of Ausubel et al. (1994), Current Protocols in Molecular Biology, Current Protocols. Standard materials and methods for plant molecular work are described in Plant Molecular Biology Labfax (1993) by R. D. D. Croy, published by BIOS Scientific Publications Ltd (UK) and Blackwell Scientific Publications (UK).

[0766] The nucleic acid sequence used in the methods of the invention was amplified by PCR using as template a custom-made Arabidopsis thaliana seedlings cDNA library (in pCMV Sport 6.0; Invitrogen, Paisley, UK). PCR was performed using Hifi Taq DNA polymerase in standard conditions, using 200 ng of template in a 50 μl PCR mix. The primers used were prm2500 (SEQ ID NO: 3; sense, start codon in bold:

5′ ggggacaagtttgtacaaaaaagcaggcttcacaatggaaaacaaaa
gccatagc 3′)

and prm2501 (SEQ ID NO: 4; reverse, complementary,:

5′ ggggaccactttgtacaagaaagctgggtaaacaaaagagtgtcatg
gca 3′),

which include the AttB sites for Gateway recombination. The amplified PCR fragment was purified also using standard methods. The first step of the Gateway procedure, the BP reaction, was then performed, during which the PCR fragment recombines in vivo with the pDONR201 plasmid to produce, according to the Gateway terminology, an “entry clone”, p031. Plasmid pDONR201 was purchased from Invitrogen, as part of the Gateway® technology.

### Example 4

### Expression Vector Construction

[0767] The entry clone p031 was subsequently used in an LR reaction with p05050, a destination vector used for Oryza sativa transformation. This vector contains as functional elements within the T-DNA borders: a plant selectable marker; a screenable marker expression cassette; and a Gateway cassette intended for LR in vivo recombination with the nucleic acid sequence of interest already cloned in the entry clone. A rice non-viral constitutive promoter, the GOS2 promoter (SEQ ID NO: 58) was located upstream of this Gateway cassette.

[0768] After the LR recombination step, the resulting expression vector p030 (FIG. 4) was transformed into Agrobacterium strain LBA4044 and subsequently to Oryza sativa plants.

### Example 5

### Plant Transformation

### Rice Transformation

[0769] The Agrobacterium containing the expression vector was used to transform Oryza sativa plants. Mature dry seeds of the rice japonica cultivar Nipponbare were dehusked. Sterilization was carried out by incubating for one minute in 70% ethanol, followed by 30 minutes in 0.2% HgCl₂, followed by a 6 times 15 minutes wash with sterile distilled water. The sterile seeds were then germinated on a medium containing 2,4-D (callus induction medium). After incubation in the dark for four weeks, embryogenic, scutellum-derived calli were excised and propagated on the same medium. After two weeks, the calli were multiplied or propagated by subculture on the same medium for another 2 weeks. Embryogenic callus pieces were sub-cultured on fresh medium 3 days before co-cultivation (to boost cell division activity).

[0770] Agrobacterium strain LBA4404 containing the expression vector was used for co-cultivation. Agrobacterium was inoculated on AB medium with the appropriate antibiotics and cultured for 3 days at 28° C. The bacteria were then collected and suspended in liquid co-cultivation medium to a density (OD₆₀₀) of about 1. The suspension was then transferred to a Petri dish and the calli immersed in the suspension for 15 minutes. The callus tissues were then blotted dry on a filter paper and transferred to solidified, co-cultivation medium and incubated for 3 days in the dark at 25° C. Co-cultivated calli were grown on 2,4-D-containing medium for 4 weeks in the dark at 28° C. in the presence of a selection agent. During this period, rapidly growing resistant callus islands developed. After transfer of this material to a regeneration medium and incubation in the light, the embryogenic potential was released and shoots developed in the next four to five weeks. Shoots were excised from the calli and incubated for 2 to 3 weeks on an auxin-containing medium from which they were transferred to soil. Hardened shoots were grown under high humidity and short days in a greenhouse.

[0771] Approximately 35 independent T0 rice transformants were generated for one construct. The primary transformants were transferred from a tissue culture chamber to a greenhouse. After a quantitative PCR analysis to verify copy number of the T-DNA insert, only single copy transgenic plants that exhibit tolerance to the selection agent were kept for harvest of T1 seed. Seeds were then harvested three to five months after transplanting. The method yielded single locus transformants at a rate of over 50% (Aldemita and Hodgesl996, Chan et al. 1993, Hiei et al. 1994).

### Corn Transformation

[0772] Transformation of maize (Zea mays) is performed with a modification of the method described by Ishida et al. (1996) Nature Biotech 14(6): 745-50. Transformation is genotype-dependent in corn and only specific genotypes are amenable to transformation and regeneration. The inbred line A188 (University of Minnesota) or hybrids with A188 as a parent are good sources of donor material for transformation, but other genotypes can be used successfully as well. Ears are harvested from corn plant approximately 11 days after pollination (DAP) when the length of the immature embryo is about 1 to 1.2 mm. Immature embryos are cocultivated with Agrobacterium tumefaciens containing the expression vector, and transgenic plants are recovered through organogenesis. Excised embryos are grown on callus induction medium, then maize regeneration medium, containing the selection agent (for example imidazolinone but various selection markers can be used). The Petri plates are incubated in the light at 25° C. for 2-3 weeks, or until shoots develop. The green shoots are transferred from each embryo to maize rooting medium and incubated at 25° C. for 2-3 weeks, until roots develop. The rooted shoots are transplanted to soil in the greenhouse. T1 seeds are produced from plants that exhibit tolerance to the selection agent and that contain a single copy of the T-DNA insert.

### Wheat Transformation

[0773] Transformation of wheat is performed with the method described by Ishida et al. (1996) Nature Biotech 14(6): 745-50. The cultivar Bobwhite (available from CIMMYT, Mexico) is commonly used in transformation. Immature embryos are co-cultivated with Agrobacterium tumefaciens containing the expression vector, and transgenic plants are recovered through organogenesis. After incubation with Agrobacterium, the embryos are grown in vitro on callus induction medium, then regeneration medium, containing the selection agent (for example imidazolinone but various selection markers can be used). The Petri plates are incubated in the light at 25° C. for 2-3 weeks, or until shoots develop. The green shoots are transferred from each embryo to rooting medium and incubated at 25° C. for 2-3 weeks, until roots develop. The rooted shoots are transplanted to soil in the greenhouse. T1 seeds are produced from plants that exhibit tolerance to the selection agent and that contain a single copy of the T-DNA insert.

### Soybean Transformation

[0774] Soybean is transformed according to a modification of the method described in the Texas A&M U.S. Pat. No. 5,164,310. Several commercial soybean varieties are amenable to transformation by this method. The cultivar Jack (available from the Illinois Seed foundation) is commonly used for transformation. Soybean seeds are sterilised for in vitro sowing. The hypocotyl, the radicle and one cotyledon are excised from seven-day old young seedlings. The epicotyl and the remaining cotyledon are further grown to develop axillary nodes. These axillary nodes are excised and incubated with Agrobacterium tumefaciens containing the expression vector. After the cocultivation treatment, the explants are washed and transferred to selection media. Regenerated shoots are excised and placed on a shoot elongation medium. Shoots no longer than 1 cm are placed on rooting medium until roots develop. The rooted shoots are transplanted to soil in the greenhouse. T1 seeds are produced from plants that exhibit tolerance to the selection agent and that contain a single copy of the T-DNA insert.

### Rapeseed/Canola Transformation

[0775] Cotyledonary petioles and hypocotyls of 5-6 day old young seedling are used as explants for tissue culture and transformed according to Babic et al. (1998, Plant Cell Rep 17: 183-188). The commercial cultivar Westar (Agriculture Canada) is the standard variety used for transformation, but other varieties can also be used. Canola seeds are surface-sterilized for in vitro sowing. The cotyledon petiole explants with the cotyledon attached are excised from the in vitro seedlings, and inoculated with Agrobacterium (containing the expression vector) by dipping the cut end of the petiole explant into the bacterial suspension. The explants are then cultured for 2 days on MSBAP-3 medium containing 3 mg/l BAP, 3% sucrose, 0.7% Phytagar at 23° C., 16 hr light. After two days of co-cultivation with Agrobacterium, the petiole explants are transferred to MSBAP-3 medium containing 3 mg/l BAP, cefotaxime, carbenicillin, or timentin (300 mg/l) for 7 days, and then cultured on MSBAP-3 medium with cefotaxime, carbenicillin, or timentin and selection agent until shoot regeneration. When the shoots are 5-10 mm in length, they are cut and transferred to shoot elongation medium (MSBAP-0.5, containing 0.5 mg/l BAP). Shoots of about 2 cm in length are transferred to the rooting medium (MSO) for root induction. The rooted shoots are transplanted to soil in the greenhouse. T1 seeds are produced from plants that exhibit tolerance to the selection agent and that contain a single copy of the T-DNA insert.

### Alfalfa Transformation

[0776] A regenerating clone of alfalfa (Medicago sativa) is transformed using the method of (McKersie et al., 1999 Plant Physiol 119: 839-847). Regeneration and transformation of alfalfa is genotype dependent and therefore a regenerating plant is required. Methods to obtain regenerating plants have been described. For example, these can be selected from the cultivar Rangelander (Agriculture Canada) or any other commercial alfalfa variety as described by Brown DCW and A Atanassov (1985. Plant Cell Tissue Organ Culture 4: 111-112). Alternatively, the RA3 variety (University of Wisconsin) has been selected for use in tissue culture (Walker et al., 1978 μm J Bot 65:654-659). Petiole explants are cocultivated with an overnight culture of Agrobacterium tumefaciens C58C1 pMP90 (McKersie et al., 1999 Plant Physiol 119: 839-847) or LBA4404 containing the expression vector. The explants are cocultivated for 3 d in the dark on SH induction medium containing 288 mg/L Pro, 53 mg/L thioproline, 4.35 g/L K2SO4, and 100 μm acetosyringinone. The explants are washed in half-strength Murashige-Skoog medium (Murashige and Skoog, 1962) and plated on the same SH induction medium without acetosyringinone but with a suitable selection agent and suitable antibiotic to inhibit Agrobacterium growth. After several weeks, somatic embryos are transferred to BOi2Y development medium containing no growth regulators, no antibiotics, and 50 g/L sucrose. Somatic embryos are subsequently germinated on half-strength Murashige-Skoog medium. Rooted seedlings were transplanted into pots and grown in a greenhouse. T1 seeds are produced from plants that exhibit tolerance to the selection agent and that contain a single copy of the T-DNA insert.

### Example 6

### Evaluation Procedure

### 6.1 Evaluation Setup

[0777] Approximately 30 independent TO rice transformants were generated. The primary transformants were transferred from a tissue culture chamber to a greenhouse for growing and harvest of T1 seed. Seven events, of which the T1 progeny segregated 3:1 for presence/absence of the transgene, were retained. For each of these events, approximately 10 T1 seedlings containing the transgene (hetero- and homo-zygotes) and approximately 10 T1 seedlings lacking the transgene (nullizygotes) were selected by monitoring visual marker expression. The transgenic plants and the corresponding nullizygotes were grown side-by-side at random positions. Greenhouse conditions were of shorts days (12 hours light), 28° C. in the light and 22° C. in the dark, and a relative humidity of 70%. Four T1 events were further evaluated in the T2 generation following the same evaluation procedure as for the T1 generation but with more individuals per event. From the stage of sowing until the stage of maturity the plants were passed several times through a digital imaging cabinet. At each time point digital images (2048×1536 pixels, 16 million colours) were taken of each plant from at least 6 different angles.

6.2 Statistical Analysis: t-Test and F-Test

[0778] A two factor ANOVA (analysis of variants) was used as a statistical model for the overall evaluation of plant phenotypic characteristics. An F-test was carried out on all the parameters measured of all the plants of all the events transformed with the gene of the present invention. The F-test was carried out to check for an effect of the gene over all the transformation events and to verify for an overall effect of the gene, also known as a global gene effect. The threshold for significance for a true global gene effect was set at a 5% probability level for the F-test. A significant F-test value points to a gene effect, meaning that it is not only the mere presence or position of the gene that is causing the differences in phenotype.

### Example 7

### Evaluation Results

[0779] The plant aboveground area (or leafy biomass) was determined by counting the total number of pixels on the digital images from aboveground plant parts discriminated from the background. This value was averaged for the pictures taken on the same time point from the different angles and was converted to a physical surface value expressed in square mm by calibration. Experiments show that the aboveground plant area measured this way correlates with the biomass of plant parts above ground. The above ground area is the time point at which the plant had reached its maximal leafy biomass.

[0780] The mature primary panicles were harvested, counted, bagged, barcode-labeled and then dried for three days in an oven at 37° C. The panicles were then threshed and all the seeds were collected and counted. The filled husks were separated from the empty ones using an air-blowing device. The empty husks were discarded and the remaining fraction was counted again. The filled husks were weighed on an analytical balance. The number of filled seeds was determined by counting the number of filled husks that remained after the separation step. The total seed yield was measured by weighing all filled husks harvested from a plant.

[0781] As presented in Tables D to F, the aboveground biomass, the seed yield, the number of filled seeds are increased in the transgenic plants with increased expression of a nucleic acid encoding an ERLK protein, compared to suitable control plants. Results from the T1 and the T2 generations are shown.

[0782] Table D shows the increase in aboveground biomass in percent, as well as the statistical relevance of this increase according to the F-test, in the T1 and T2 generation of transgenic rice with increased expression of a nucleic acid encoding an ERLK protein.

TABLE D
Aboveground biomass

| | % Difference | P value of F test |
|---|---|---|
| T1 generation | 11 | 0.0137 |
| T2 generation | 12 | 0.0229 |

[0783] Table E shows the increase in total seed yield (total seed weight) in percent, as well as the statistical relevance of this increase according to the F-test, in the T1 and T2 generation of transgenic rice with increased expression of a nucleic acid encoding an ERLK protein.

TABLE E
Seed yield

| | % Difference | P value of F test |
|---|---|---|
| T1 generation | 18 | 0.0253 |
| T2 generation | 22 | 0.0062 |

[0784] Table F shows the increase in the number of filled seeds in percent, as well as the statistical relevance of this increase according to the F-test, in the T1 and T2 generation of transgenic rice with increased expression of a nucleic acid encoding an ERLK protein.

TABLE F
Number of filled seeds

| | % Difference | P value of F test |
|---|---|---|
| T1 generation | 15 | 0.0042 |
| T2 generation | 18 | 0.0019 |

### FBXW

### Example 8

### Identification of Sequences Related to the Nucleic Acid Sequence Used in the Methods of the Invention

[0785] Sequences (full length cDNA, ESTs or genomic) related to the nucleic acid sequence used in the methods of the present invention were identified amongst those maintained in the Entrez Nucleotides database at the National Center for Biotechnology Information using database sequence search tools, such as the Basic Local Alignment Tool (BLAST) (Altschul et al. (1990) J. Mol. Biol. 215:403-410; and Altschul et al. (1997) Nucleic Acids Res. 25:3389-3402). The program is used to find regions of local similarity between sequences by comparing nucleic acid or polypeptide sequences to sequence databases and by calculating the statistical significance of matches. The polypeptide encoded by the nucleic acid of the present invention was used for the TBLASTN algorithm, with default settings and the filter to ignore low complexity sequences set off. The output of the analysis was viewed by pairwise comparison, and ranked according to the probability score (E-value), where the score reflect the probability that a particular alignment occurs by chance (the lower the E-value, the more significant the hit). In addition to E-values, comparisons were also scored by percentage identity. Percentage identity refers to the number of identical nucleotides (or amino acids) between the two compared nucleic acid (or polypeptide) sequences over a particular length. In some instances, the default parameters may be adjusted to modify the stringency of the search The Table below provides a list of nucleic acid sequences related to the nucleic acid sequence useful in performing the methods of the present invention.

TABLE G
nucleic acid sequences related to the nucleic acid sequence (SEQ ID NO: 59) used
in the methods of the present invention, and the corresponding deduced polypeptides

| | | | | NCBI | |
|---|---|---|---|---|---|
| | Nucleic acid | Polypeptide | Sequence | accession | Source |
| Name | SEQ ID NO | SEQ ID NO | length | number | organism |
| Arath_FBXW | 59 | 60 | Full length | NM_122112.2 | Arabidopsis |
| (At5g21040) | | | | | thaliana |
| Orysa_FBXW | 61 | 62 | Full length | AK111585 | Oryza sativa |
| Medtr_FBXW | 63 | 64 | Full length | CR931734 | Medicago |
| | | | | (spliced out) | trunculata |
| Triae_FBXW | 65 | 66 | Full length | CJ661176.1 | Triticum |
| | | | | CB307121.1 | aestivum |
| | | | | CJ553648.1 | |
| Poptr_FBXW | 67 | 68 | Full length | Proprietary | Populus |
| | | | | | tremuloides |
| Zeama_FBXW | 69 | 70 | Full length | AC183938.1 | Zea mays |
| | | | | (spliced out) | |
| Vitvi_FBXW | 71 | 72 | Partial (3′) | CF210354 | Vitis vinifera |
| | | | | CF413646 | |
| | | | | CF213082 | |
| Senca_FBXW | 73 | 74 | Partial (5′) | DY662683.1 | Senecio |
| | | | | | cambrensis |
| Helan_FBXW | 75 | 76 | Partial | DY916708 | Helianthus |
| | | | (middle) | | annuus |
| Eupes_FBXW | 77 | 78 | Partial | DV129599 | Euphorbia |
| | | | (middle) | | esula |
| Lyces_FBXW | 79 | 80 | partial | BI931509 | Lycopersicon |
| | | | (middle) | | esculentum |
| Aqufo_FBXW | 81 | 82 | Partial | DT753991.1 | Aquilegia |
| | | | (middle) | | formosa x |
| | | | | | Aquilegia |
| | | | | | pubescens |
| Goshi_FBXW | 83 | 84 | Partial (3′) | DT466472 | Gossypium |
| | | | | | hirsutum |
| Sorbi_FBXW | 85 | 86 | Partial | CF770159 | Sorghum |
| | | | (middle) | | bicolor |
| Iponi_FBXW | 87 | 88 | Partial (3′) | BJ574759.1 | Ipomea nil |
| Soltu_FBXW | 89 | 90 | Partial (3′) | CX161187 | Solanum |
| | | | | | tuberosum |
| Zamfi_FBXW | 91 | 92 | Partial | DY032229 | Zamia |
| | | | (middle) | | fischeri |
| Peram_FBXW | 93 | 94 | Partial (3′) | CK756534 | Persea |
| | | | | | americana |
| Glyma_FBXW | 95 | 96 | Partial (3′) | CD418593.1 | Glycine max |
| Brara_FBXW | 107 | 108 | full length | AC189583 | Brassica |
| | | | | | rapa |
| Sorbi_FBXW | 109 | 110 | full length | contig of | Sorghum |
| | | | | BI075893 | bicolor |
| | | | | CW484775 | |
| | | | | CF770159 | |
| | | | | CF770238 | |
| Vitvi_FBXW | 111 | 112 | full length | AM440865 | Vitis vinifera |

### Example 9

### Determination of Global Similarity and Identity Between FBXW Polypeptides, and Their Conserved Regions as Represented by SEQ ID NO: 102 and SEQ ID NO: 103 (Both Comprised in SEQ ID NO: 60)

[0786] Global percentages of similarity and identity between full length FBXW polypeptides were determined using one of the methods available in the art, the MatGAT (Matrix Global Alignment Tool) software (BMC Bioinformatics. 2003 4:29. MatGAT: an application that generates similarity/identity matrices using protein or DNA sequences. Campanella J J, Bitincka L, Smalley J; software hosted by Ledion Bitincka). MatGAT software generates similarity/identity matrices for DNA or protein sequences without needing pre-alignment of the data. The program performs a series of pair-wise alignments using the Myers and Miller global alignment algorithm (with a gap opening penalty of 12, and a gap extension penalty of 2), calculates similarity and identity using for example Blosum 62 (for polypeptides), and then places the results in a distance matrix. Sequence similarity is shown in the bottom half of the dividing line and sequence identity is shown in the top half of the diagonal dividing line. The sequence of SEQ ID NO: 60 is from Arabidopsis thaliana (code Arath_FBXW).

Parameters used in the comparison were:
[0787] Scoring matrix: Blosum62
[0788] First Gap: 12
[0789] Extending gap: 2

[0790] Results of the software analysis are shown in Table H for the global similarity and identity over the full length of the FBXW polypeptides. Percentage identity is given above the diagonal and percentage similarity is given below the diagonal. Percentage identity between the FBXW paralogues and orthologues ranges between 45 and 80%, reflecting the relatively low sequence identity conservation between them.

TABLE H
MatGAT results for global similarity and identity over the
full length of the FBXW polypeptides.

| Global similarity | | | | | | |
|---|---|---|---|---|---|---|
| and identity over the | | | | | | |
| full length of the | | | | | | |
| FBXW polypeptides | 1 | 2 | 3 | 4 | 5 | 6 |
| 1. Arath_FBXW | | 57.9 | 51.1 | 63.5 | 50.4 | 49.6 |
| 2. Medtr_FBXW | 72 | | 51.2 | 61.7 | 50.2 | 49.1 |
| 3. Orysa_FBXW | 68.7 | 66.6 | | 51.6 | 76.5 | 74.4 |
| 4. Poptr_FBXW | 77.7 | 75.1 | 69.9 | | 52.8 | 52.3 |
| 5. Triae_FBXW | 67.7 | 65.7 | 87.7 | 69.6 | | 72.4 |
| 6. Zeama_FBXW | 67.2 | 65.2 | 83.7 | 67.2 | 82.6 | |

[0791] Results of the software analysis are shown in Tables I and J for the global similarity and identity over the conserved regions 1 (as represented by SEQ ID NO: 102 comprised in SEQ ID NO: 60) and 2 (SEQ ID NO: 103 comprised in SEQ ID NO: 60) of the FBXW polypeptides. Percentage identity is given above the diagonal and percentage similarity is given below the diagonal. Percentage identity of FBXW paralogues and orthologues within the conserved region 1 (as in SEQ ID NO: 102) and within the conserved region 2 (as in SEQ ID NO: 103) ranges between 65% and 100% (similarity between 85 and 100%).

TABLE I
MatGAT results for global similarity and identity over the conserved region 1 (as in
SEQ ID NO: 102) of the FBXW polypeptides.

| Global similarity and identity | | | | | | | | | | | | | |
|---|---|---|---|---|---|---|---|---|---|---|---|---|---|
| over the conserved region 1 of | | | | | | | | | | | | | |
| the FBXW polypeptides | 1 | 2 | 3 | 4 | 5 | 6 | 7 | 8 | 9 | 10 | 11 | 12 | 13 |
| 1. Cons1_Iponi_FBXW | | 94.7 | 84.2 | 92.1 | 89.5 | 84.2 | 81.6 | 97.4 | 97.4 | 81.6 | 81.6 | 81.6 | 84.2 |
| 2. Cons1_Soltu_FBXW | 97.4 | | 81.6 | 86.8 | 89.5 | 84.2 | 86.8 | 97.4 | 92.1 | 76.3 | 76.3 | 76.3 | 78.9 |
| 3. Cons1_Peram_FBXW | 94.7 | 97.4 | | 78.9 | 81.6 | 76.3 | 78.9 | 84.2 | 84.2 | 81.6 | 78.9 | 73.7 | 78.9 |
| 4. Cons1_Glyma_FBXW | 94.7 | 92.1 | 89.5 | | 84.2 | 78.9 | 73.7 | 89.5 | 89.5 | 76.3 | 76.3 | 78.9 | 78.9 |
| 5. Cons1_Poptr_FBXW | 100 | 97.4 | 94.7 | 94.7 | | 84.2 | 78.9 | 86.8 | 89.5 | 78.9 | 78.9 | 76.3 | 81.6 |
| 6. Cons1_Vitvi_FBXW | 100 | 97.4 | 97.4 | 94.7 | 100 | | 76.3 | 81.6 | 81.6 | 78.9 | 78.9 | 73.7 | 81.6 |
| 7. Cons1_Aqufo_FBXW | 94.7 | 97.4 | 97.4 | 89.5 | 94.7 | 94.7 | | 84.2 | 81.6 | 78.9 | 73.7 | 71.1 | 76.3 |
| 8. Cons1_Goshi_FBXW | 97.4 | 100 | 97.4 | 92.1 | 97.4 | 97.4 | 97.4 | | 94.7 | 78.9 | 78.9 | 78.9 | 81.6 |
| 9. Cons1_Medtr_FBXW | 97.4 | 94.7 | 92.1 | 92.1 | 97.4 | 97.4 | 94.7 | 94.7 | | 81.6 | 81.6 | 81.6 | 84.2 |
| 10. Cons1_Orysa_FBXW | 100 | 97.4 | 97.4 | 94.7 | 100 | 100 | 94.7 | 97.4 | 97.4 | | 89.5 | 71.1 | 94.7 |
| 11. Cons1_Triae_FBXW | 100 | 97.4 | 97.4 | 94.7 | 100 | 100 | 94.7 | 97.4 | 97.4 | 100 | | 65.8 | 94.7 |
| 12. Cons1_Arath_FBXW | 92.1 | 89.5 | 86.8 | 94.7 | 92.1 | 92.1 | 86.8 | 89.5 | 89.5 | 92.1 | 92.1 | | 68.4 |
| 13. Cons1_Zeama_FBXW | 100 | 97.4 | 97.4 | 94.7 | 100 | 100 | 94.7 | 97.4 | 97.4 | 100 | 100 | 92.1 | |

TABLE J
MatGAT results for global similarity and identity over the conserved region 2 (as in
SEQ ID NO: 103) of the FBXW polypeptides.

| Global similarity and identity | | | | | | | | | | | | | |
|---|---|---|---|---|---|---|---|---|---|---|---|---|---|
| over the conserved region 2 of | | | | | | | | | | | | | |
| the FBXW polypeptides | 1 | 2 | 3 | 4 | 5 | 6 | 7 | 8 | 9 | 10 | 11 | 12 | 13 |
| 1. Cons2_Ipono_FBXW | | 92.3 | 84.6 | 78.5 | 81.5 | 83.1 | 84.6 | 83.1 | 84.6 | 72.3 | 73.8 | 84.6 | 69.2 |
| 2. Cons2_Soltu_FBXW | 96.9 | | 83.1 | 78.5 | 78.5 | 81.5 | 81.5 | 83.1 | 84.6 | 70.8 | 73.8 | 78.5 | 70.8 |
| 3. Cons2_Peram_FBXW | 95.4 | 95.4 | | 81.5 | 84.6 | 87.7 | 81.5 | 89.2 | 84.6 | 73.8 | 75.4 | 81.5 | 73.8 |
| 4. Cons2_Glyma_FBXW | 92.3 | 92.3 | 93.8 | | 80 | 81.5 | 78.5 | 83.1 | 87.7 | 70.8 | 72.3 | 78.5 | 67.7 |
| 5. Cons2_Poptr_FBXW | 90.8 | 90.8 | 93.8 | 92.3 | | 86.2 | 78.5 | 86.2 | 80 | 69.2 | 72.3 | 81.5 | 69.2 |
| 6. Cons2_Vitvi_FBXW | 90.8 | 90.8 | 95.4 | 92.3 | 93.8 | | 80 | 90.8 | 81.5 | 73.8 | 75.4 | 80 | 70.8 |
| 7. Cons2_Aqufo_FBXW | 93.8 | 93.8 | 95.4 | 92.3 | 90.8 | 90.8 | | 83.1 | 87.7 | 73.8 | 75.4 | 81.5 | 70.8 |
| 8. Cons2_Goshi_FBXW | 92.3 | 92.3 | 96.9 | 93.8 | 93.8 | 95.4 | 95.4 | | 87.7 | 80 | 80 | 80 | 75.4 |
| 9. Cons2_Medtr_FBXW | 92.3 | 92.3 | 93.8 | 93.8 | 89.2 | 89.2 | 95.4 | 93.8 | | 75.4 | 76.9 | 83.1 | 69.2 |
| 10. Cons2_Orysa_FBXW | 90.8 | 87.7 | 92.3 | 87.7 | 89.2 | 89.2 | 89.2 | 93.8 | 87.7 | | 86.2 | 69.2 | 84.6 |
| 11. Cons2_Triae_FBXW | 89.2 | 86.2 | 90.8 | 89.2 | 87.7 | 87.7 | 89.2 | 93.8 | 87.7 | 96.9 | | 69.2 | 83.1 |
| 12. Cons2_Arath_FBXW | 93.8 | 92.3 | 92.3 | 90.8 | 89.2 | 89.2 | 90.8 | 90.8 | 89.2 | 89.2 | 89.2 | | 66.2 |
| 13. Cons2_Zeama_FBXW | 87.7 | 87.7 | 89.2 | 84.6 | 86.2 | 86.2 | 86.2 | 90.8 | 84.6 | 96.9 | 93.8 | 87.7 | |

### Example 10

### Cloning of the Nucleic Acid Sequence Used in the Methods of the Invention

[0792] DNA manipulation: unless otherwise stated, recombinant DNA techniques are performed according to standard protocols described in (Sambrook (2001) Molecular Cloning: a laboratory manual, 3rd Edition Cold Spring Harbor Laboratory Press, CSH, New York) or in Volumes 1 and 2 of Ausubel et al. (1994), Current Protocols in Molecular Biology, Current Protocols. Standard materials and methods for plant molecular work are described in Plant Molecular Biology Labfax (1993) by R. D. D. Croy, published by BIOS Scientific Publications Ltd (UK) and Blackwell Scientific Publications (UK).

[0793] The nucleic acid sequence used in the methods of the invention was amplified by PCR using as template a custom-made Arabidopsis thaliana mixed tissues cDNA library (in pCMV Sport 6.0; Invitrogen, Paisley, UK). PCR was performed using Hifi Taq DNA polymerase in standard conditions, using 200 ng of template in a 50 μl PCR mix. The primers used were prmO6999 (SEQ ID NO: 105; sense, AttB1 site in lower case:

5′-ggggacaagtttgtacaaaaaagcaggcttaaacaATGAATCGTTTT
TCTCGTTT 3′)

and prmO7000 (SEQ ID NO: 106; reverse, complementary, AttB2 site in lower case:

5′ ggggaccactttgtacaagaaagctgggtATCCAATCTTATCGCTTA
GG3′),

which include the AttB sites for Gateway recombination. The amplified PCR fragment was purified also using standard methods. The first step of the Gateway procedure, the BP reaction, was then performed, during which the PCR fragment recombines in vivo with the pDONR201 plasmid to produce, according to the Gateway terminology, an “entry clone”, p08433. Plasmid pDONR201 was purchased from Invitrogen, as part of the Gateway® technology.

### Example 11

### Expression Vector Construction

[0794] The entry clone p08433 was subsequently used in an LR reaction with p00640, a destination vector used for Oryza sativa transformation. This vector contains as functional elements within the T-DNA borders: a plant selectable marker; a screenable marker expression cassette; and a Gateway cassette intended for LR in vivo recombination with the nucleic acid sequence of interest already cloned in the entry clone. A rice GOS2 promoter (SEQ ID NO: 58) for constitutive expression (PRO0129) was located upstream of this Gateway cassette.

[0795] After the LR recombination step, the resulting expression vector p15973 (FIG. 7) was transformed into Agrobacterium strain LBA4044 and subsequently to Oryza sativa plants. Transformed rice plants were allowed to grow and were then examined for the parameters described below.

### Example 12

### Evaluation Procedure

### 12.1 Evaluation Setup

[0796] Approximately 35 independent T0 rice transformants were generated. The primary transformants were transferred from a tissue culture chamber to a greenhouse for growing and harvest of T1 seed. Seven events, of which the T1 progeny segregated 3:1 for presence/absence of the transgene, were retained. For each of these events, approximately 10 T1 seedlings containing the transgene (hetero- and homo-zygotes) and approximately 10 T1 seedlings lacking the transgene (nullizygotes) were selected by monitoring visual marker expression. The transgenic plants and the corresponding nullizygotes were grown side-by-side at random positions. Greenhouse conditions were of shorts days (12 hours light), 28° C. in the light and 22° C. in the dark, and a relative humidity of 70%.

[0797] Four T1 events were further evaluated in the T2 generation following the same evaluation procedure as for the T1 generation but with more individuals per event. From the stage of sowing until the stage of maturity the plants were passed several times through a digital imaging cabinet. At each time point digital images (2048×1536 pixels, 16 million colours) were taken of each plant from at least 6 different angles.

### 12.2 Statistical Analysis: F-Test

[0798] A two factor ANOVA (analysis of variants) was used as a statistical model for the overall evaluation of plant phenotypic characteristics. An F-test was carried out on all the parameters measured of all the plants of all the events transformed with the gene of the present invention. The F-test was carried out to check for an effect of the gene over all the transformation events and to verify for an overall effect of the gene, also known as a global gene effect. The threshold for significance for a true global gene effect was set at a 5% probability level for the F-test. A significant F-test value points to a gene effect, meaning that it is not only the mere presence or position of the gene that is causing the differences in phenotype.

### Example 13

### Evaluation Results

[0799] The plant aboveground area (or leafy biomass) was determined by counting the total number of pixels on the digital images from aboveground plant parts discriminated from the background. This value was averaged for the pictures taken on the same time point from the different angles and was converted to a physical surface value expressed in square mm by calibration. Experiments show that the aboveground plant area measured this way correlates with the biomass of plant parts above ground. The above ground area is the time point at which the plant had reached its maximal leafy biomass.

[0800] The mature primary panicles were harvested, counted, bagged, barcode-labeled and then dried for three days in an oven at 37° C. The panicles were then threshed and all the seeds were collected and counted. The filled husks were separated from the empty ones using an air-blowing device. The empty husks were discarded and the remaining fraction was counted again. The filled husks were weighed on an analytical balance. The number of filled seeds was determined by counting the number of filled husks that remained after the separation step. The total seed yield was measured by weighing all filled husks harvested from a plant. Total seed number per plant was measured by counting the number of husks harvested from a plant. Thousand kernel weight (TKW) is extrapolated from the number of filled seeds counted and their total weight. The harvest index (HI) in the present invention is defined as the ratio between the total seed yield and the above ground area (mm²), multiplied by a factor 10⁶. The total number of flowers per panicle as defined in the present invention is the ratio between the total number of seeds and the number of mature primary panicles. The seed fill rate as defined in the present invention is the proportion (expressed as a %) of the number of filled seeds over the total number of seeds (or florets).

[0801] As presented in Tables K to O, the aboveground biomass, the number of flowers per panicle, the seed yield, the total number of seeds, the number of filled seeds, the thousand kernel weight (TKW) and harvest index are increased in the transgenic plants with increased expression a nucleic acid encoding a FBXW polypeptide, compared to suitable control plants. Results from the T1 and the T2 generations are shown.

[0802] Table K shows the number of transgenic events with an increase in total seed yield (total seed weight), the percentage of this increase, as well as the statistical relevance of this increase according to the F-test.

TABLE K
Number of transgenic events with an increase in total seed yield,
the percentage of the increase, and P value of the F-test in
T1 and T2 generation of transgenic rice with
increased expression of a nucleic acid encoding an FBXW polypeptide.
Total seed yield

| | Number of events showing | | P value |
|---|---|---|---|
| | an increase | % Difference | of F test |
| T1 generation | 6 out of 7 | 21 | 0.001 |
| T2 generation | 3 out of 4 | 17 | 0.0002 |

[0803] Table L shows the number of transgenic events with an increase in the number of filled seeds, the percentage of this increase, as well as the statistical relevance of this increase according to the F-test.

TABLE L
Number of transgenic events with an increase in number
of filled seeds, the percentage of the increase, and P value
of the F-test in T1 and T2 generation of transgenic rice with
increased expression of a nucleic acid encoding an FBXW polypeptide.
Number of filled seeds

| | | |
|---|---|---|
| Number of events showing | | P value |
| an increase | % Difference | of F test |

| | | | |
|---|---|---|---|
| T1 generation | 6 out of 7 | 20 | 0.0017 |
| T2 generation | 3 out of 4 | 17 | 0.0002 |

[0804] Table M shows the number of transgenic events with an increase in harvest index, the percentage of this increase, as well as the statistical relevance of this increase according to the F-test.

TABLE M
Number of transgenic events with an increase in harvest index, the
percentage of the increase, and P value of the F-test in T1 and T2
generation of transgenic rice with increased
expression of a nucleic acid encoding an FBXW polypeptide.
Harvest index

| | Number of events showing | | P value |
|---|---|---|---|
| | an increase | % Difference | of F test |
| T1 generation | 6 out of 7 | 17 | 0.0009 |
| T2 generation | 3 out of 4 | 15 | <0.0001 |

[0805] Table N shows the number of transgenic events with an increase in the thousand kernel weight (TKW), the percentage of this increase, as well as the statistical relevance of this increase according to the F-test.

TABLE N
Number of transgenic events with an increase in thousand
kernel weight (TKW), the percentage of the increase, and
P value of the F-test in T1 and T2 generation of transgenic rice with
increased expression of a nucleic acid encoding an FBXW polypeptide.
TKW

| | Number of events showing | | P value |
|---|---|---|---|
| | an increase | % Difference | of F test |
| T1 generation | 5 out of 7 | 2 | 0.0187 |
| T2 generation | 2 out of 4 | 1 | 0.0022 |

[0806] Table O shows the number of transgenic events with an increase in the seed fill rate, the percentage of this increase, as well as the statistical relevance of this increase according to the F-test.

TABLE O
Number of transgenic events with an increase in fill rate,
the percentage of the increase, and P value of the F-test
in T1 and T2 generation of transgenic rice with increased
expression of a nucleic acid encoding an FBXW polypeptide.
Seed fill rate

| | Number of events showing | | P value |
|---|---|---|---|
| | an increase | % Difference | of F test |
| T1 generation | 6 out of 7 | 15 | 0.0005 |
| T2 generation | 3 out of 4 | 9 | <0.0001 |

### RANBP

### Example 14

### Identification of Sequences Related to the Nucleic Acid Sequence Used in the Methods of the Invention

[0807] Sequences (full length cDNA, ESTs or genomic) related to the nucleic acid sequence used in the methods of the present invention were identified amongst those maintained in the Entrez Nucleotides database at the National Center for Biotechnology Information (NCBI) using database sequence search tools, such as the Basic Local Alignment Tool (BLAST) (Altschul et al. (1990) J. Mol. Biol. 215:403-410; and Altschul et al. (1997) Nucleic Acids Res. 25:3389-3402). The program is used to find regions of local similarity between sequences by comparing nucleic acid or polypeptide sequences to sequence databases and by calculating the statistical significance of matches. For example, the polypeptide encoded by the nucleic acid used in the present invention was used for the TBLASTN algorithm, with default settings and the filter to ignore low complexity sequences set off. The output of the analysis was viewed by pairwise comparison, and ranked according to the probability score (E-value), where the score reflect the probability that a particular alignment occurs by chance (the lower the E-value, the more significant the hit). In addition to E-values, comparisons were also scored by percentage identity. Percentage identity refers to the number of identical nucleotides (or amino acids) between the two compared nucleic acid (or polypeptide) sequences over a particular length. In some instances, the default parameters may be adjusted to modify the stringency of the search. For example the E-value may be increased to show less stringent matches. This way, short nearly exact matches may be identified.

[0808] Table P provides a list of nucleic acid sequences related to the nucleic acid sequence used in the methods of the present invention.

TABLE P
Nucleic acid sequences related to the nucleic acid sequence
(SEQ ID NO: 113) useful in the methods of the present invention,
and the corresponding deduced polypeptides.

| | Nucleic acid | Protein |
|---|---|---|
| Plant Source | SEQ ID NO: | SEQ ID NO: |
| Zea mays | 113 | 114 |
| Zea mays | 113 | 115 |
| Arabidopsis thaliana | 116 | 117 |
| Arabidopsis thaliana | 116 | 118 |
| Arabidopsis thaliana | 119 | 120 |
| Arabidopsis thaliana | 121 | 122 |
| Lycopersicon esculentum | 123 | 124 |
| Oryza sativa | 125 | 126 |
| Zea mays | 127 | 128 |
| Oryza sativa | 129 | 130 |
| Populus sp | 131 | 132 |
| Saccharum officinarum | 133 | 134 |
| Saccharum officinarum | 135 | 136 |
| Medicago | 137 | 138 |

[0809] In some instances, related sequences have tentatively been assembled and publicly disclosed by research institutions, such as The Institute for Genomic Research (TIGR). The Eukaryotic Gene Orthologs (EGO) database may be used to identify such related sequences, either by keyword search or by using the BLAST algorithm with the nucleic acid or polypeptide sequence of interest.

### Example 15

### Cloning of a Zea Mays RANBP-Encoding Nucleic Acid Sequence Used in the Methods of the Invention

[0810] The nucleic acid sequence used in the methods of the invention was amplified by PCR using as template a corn endosperm cDNA library. PCR was performed using Hifi Taq DNA polymerase in standard conditions, using 200 ng of template in a 50 μl PCR mix. The primers used were prmO6703 (SEQ ID NO: 151; sense, start codon in bold, AttB1 site in italics:

5′-ggggacaagtttgtacaaaaaagcaggcttaaacaatggcggacaag
gagc-3′)

and prm06704 (SEQ ID NO: 152; reverse, complementary, AttB2 site in italics:

5′ ggggaccactttgtacaagaaagctgggtagtgcaacc
acaccaactact 3′)

which include the AttB sites for Gateway recombination. The amplified PCR fragment was purified also using standard methods. The first step of the Gateway procedure, the BP reaction, was then performed, during which the PCR fragment recombines in vivo with the pDONR201 plasmid to produce, according to the Gateway terminology, an “entry clone”. Plasmid pDONR201 was purchased from Invitrogen, as part of the Gateway® technology.

### Example 16

### Expression Vector Construction

[0811] The entry clone was subsequently used in an LR reaction with a destination vector used for Oryza sativa transformation. This vector contains as functional elements within the T-DNA borders: a plant selectable marker; a screenable marker expression cassette; and a Gateway cassette intended for LR in vivo recombination with the nucleic acid sequence of interest already cloned in the entry clone. A prolamin promoter (SEQ ID NO: 155) for embryo-specific expression (internal reference PR090) was located upstream of this Gateway cassette.

[0812] After the LR recombination step, the resulting expression vector p072 (FIG. 9) was transformed into Agrobacterium strain LBA4044 and subsequently to Oryza sativa plants. Transformed rice plants were allowed to grow and were then examined for the parameters described below.

### Example 17

### Cloning of the Arabidopsis thaliana RANBP-Encoding Nucleic Acid Sequence Used in the Methods of the Invention

[0813] The nucleic acid sequence used in the methods of the invention was amplified by PCR using as template an Arabidopsis thaliana cDNA library (in pCMV Sport 6.0; Invitrogen, Paisley, UK). PCR was performed using Hifi Taq DNA polymerase in standard conditions, using 200 ng of template in a 50 μl PCR mix. The primers used were 6491 (SEQ ID NO: 153; sense, start codon in bold, AttB1 site in italic:

5′- ggggacaagtttgtacaaaaaagcaggcttcacaatggcgagcatt
agcaac 3′)

and 6492 (SEQ ID NO: 154; reverse, complementary, AttB2 site in italic:

5′ ggggaccactttgtacaagaaagctgggtgcatcttaagctgaggga
ac 3′),

which include the AttB sites for Gateway recombination. The amplified PCR fragment was purified also using standard methods. The first step of the Gateway procedure, the BP reaction, was then performed, during which the PCR fragment recombines in vivo with the pDONR201 plasmid to produce, according to the Gateway terminology, an “entry clone”. Plasmid pDONR201 was purchased from Invitrogen, as part of the Gatewaye technology.

### Example 18

### Expression Vector Construction

[0814] The entry clone was subsequently used in an LR reaction with a destination vector used for Oryza sativa transformation. This vector contains as functional elements within the T-DNA borders: a plant selectable marker; a screenable marker expression cassette; and a Gateway cassette intended for LR in vivo recombination with the nucleic acid sequence of interest already cloned in the entry clone. A prolamin promoter (SEQ ID NO: 155) for embryo-specific expression (internal reference PRO90) was located upstream of this Gateway cassette.

[0815] After the LR recombination step, the resulting expression vector p074 (FIG. 10) was transformed into Agrobacterium strain LBA4044 and subsequently to Oryza sativa plants. Transformed rice plants were allowed to grow and were then examined for the parameters described below.

### Example 19

### Evaluation Procedure

### 19.1 Evaluation Setup

[0816] Approximately 30 independent T0 rice transformants were generated. The primary transformants were transferred from a tissue culture chamber to a greenhouse for growing and harvest of T1 seed. Seven events, of which the T1 progeny segregated 3:1 for presence/absence of the transgene, were retained. For each of these events, approximately 10 T1 seedlings containing the transgene (hetero- and homo-zygotes) and approximately 10 T1 seedlings lacking the transgene (nullizygotes) were selected by monitoring visual marker expression. The transgenic plants and the corresponding nullizygotes were grown side-by-side at random positions. Greenhouse conditions were of shorts days (12 hours light), 28° C. in the light and 22° C. in the dark, and a relative humidity of 70%.

[0817] Four T1 events were further evaluated in the T2 generation following the same evaluation procedure as for the T1 generation but with more individuals per event. From the stage of sowing until the stage of maturity the plants were passed several times through a digital imaging cabinet. At each time point digital images (2048×1536 pixels, 16 million colours) were taken of each plant from at least 6 different angles.

19.2 Statistical Analysis: t-Test and F-Test

[0818] A two factor ANOVA (analysis of variants) was used as a statistical model for the overall evaluation of plant phenotypic characteristics. An F-test was carried out on all the parameters measured of all the plants of all the events transformed with the gene of the present invention. The F-test was carried out to check for an effect of the gene over all the transformation events and to verify for an overall effect of the gene, also known as a global gene effect. The threshold for significance for a true global gene effect was set at a 5% probability level for the F-test. A significant F-test value points to a gene effect, meaning that it is not only the mere presence or position of the gene that is causing the differences in phenotype.

[0819] To check for an effect of the genes within an event, i.e., for a line-specific effect, a t-test was performed within each event using data sets from the transgenic plants and the corresponding null plants. “Null plants” or “null segregants” or “nullizygotes” are the plants treated in the same way as the transgenic plant, but from which the transgene has segregated. Null plants can also be described as the homozygous negative transformed plants. The threshold for significance for the t-test is set at 10% probability level. The results for some events can be above or below this threshold. This is based on the hypothesis that a gene might only have an effect in certain positions in the genome, and that the occurrence of this position-dependent effect is not uncommon. This kind of gene effect is also named herein a “line effect of the gene”. The p-value is obtained by comparing the t-value to the t-distribution or alternatively, by comparing the F-value to the F-distribution. The p-value then gives the probability that the null hypothesis (i.e., that there is no effect of the transgene) is correct.

### Example 20

### Evaluation Results

[0820] Transgenic rice plants expressing a corn RANBP under the control of a prolamin promoter gave an increase in average seed weight, number of filled seeds, harvest index, biomass, fill rate, thousand kernel weight (TKW), average seed area, average seed length and average seed width, each relative to control plants. In particular, TKW was increased in the T1 generation and this increase was confirmed in T2 generation plants. The increase was found to be statistically significant with a p-value from the F-test of >0.00001. Also noteworthy was the increase in fill rate compared to control plants, with the increase in the T1 generation being confirmed in T2 generation plants. The increase was also found to be statistically significant with a p-value from the F-test of 0.001.

### Comparative Data

[0821] Transgenic rice plants expressing a corn RANBP under the control of a constitutive GOS2 promoter gave no real difference in yield compared to control plants. There was no increase in average seed weight, number of filled seeds, harvest index, biomass, fill rate or thousand kernel weight (TKW) in transgenic plants compared to control plants.

[0822] Transgenic rice plants expressing an Arabidopsis thaliana RANBP under the control of a prolamin promoter gave an increase in biomass, average seed weight, number of filled seeds, number of flowers per panicle, harvest index, fill rate and thousand kernel weight, each relative to control plants.

### GLK

### Example 21

### Identification of Homologues of the GLK Protein of SEQ ID NO: 157 in Arabidopsis, Rice and Other Plant Species

[0823] Sequences (full length cDNA, ESTs or genomic) related to the nucleic acid sequence used in the methods of the present invention were identified amongst those maintained in the Entrez Nucleotides database at the National Center for Biotechnology Information using database sequence search tools, such as the Basic Local Alignment Tool (BLAST) (Altschul et al. (1990) J. Mol. Biol. 215:403-410; and Altschul et al. (1997) Nucleic Acids Res. 25:3389-3402). This program is typically used to find regions of local similarity between sequences by comparing nucleic acid or polypeptide sequences to sequence databases and by calculating the statistical significance of matches. The polypeptide encoded by the nucleic acid of the present invention was used with the TBLASTN algorithm, with default settings and the filter for ignoring low complexity sequences was set off. The output of the analysis was viewed by pairwise comparison, and ranked according to the probability score (E-value), where the score reflect the probability that a particular alignment occurs by chance (the lower the E-value, the more significant the hit). In addition to E-values, comparisons were also scored by percentage identity. Percentage identity refers to the number of identical nucleotides (or amino acids) between the two compared nucleic acid (or polypeptide) sequences over a particular length. In some instances, the default parameters may be adjusted to modify the stringency of the search.

[0824] Rice sequences and EST sequences from various plant species may also be obtained from other databases, such as KOME (Knowledge-based Oryza Molecular biological Encyclopedia; Kikuchi et al., Science 301, 376-379, 2003), Sputnik (Rudd, S., Nucleic Acids Res., 33: D622-D627, 2005) or the Eukaryotic Gene Orthologs database (EGO, hosted by The Institute for Genomic Research). These databases are searchable with the BLAST tool. SEQ ID NO: 168 to SEQ ID NO: 193 are nucleic acid and protein sequences of homologues of SEQ ID NO: 157 and were obtained from the above-mentioned databases using SEQ ID NO: 157 as a query sequence.

TABLE Q
Nucleic acid sequences related to the nucleic acid sequence
(SEQ ID NO: 156) useful in the methods of the present invention,
and the corresponding deduced polypeptides.

| | Nucleic acid | Protein |
|---|---|---|
| Plant Source | SEQ ID NO: | SEQ ID NO: |
| OsGLK | 156 | 157 |
| OSJNBa0086P08.18 | 168 | 169 |
| Arabidopsis thaliana GLK1 | 170 | 171 |
| Arabidopsis thaliana GLK2 | 172 | 173 |
| Physcomitrella patens Glk1 | 174 | 175 |
| Physcomitrella patens Glk2 | 176 | 177 |
| Zea mays ZmGLK1 | 178 | 179 |
| Zea mays ZmGLK2 | 180 | 181 |
| Triticum aestivum TaGLK1 | 182 | 183 |
| Allium cepa AcGLK1 | 184 | 185 |
| Hordeum vulgare HvGLK2 | 186 | 187 |
| Sorghum bicolor SbGLK1 | 188 | 189 |
| Saccharum officinarum oGLK2 | 190 | 191 |
| Oryza sativa OsGLK1 | 192 | 193 |

### Example 22

### Determination of Global Similarity and Identity Between Glk Proteins

[0825] Percentages of similarity and identity between the full length GLK protein sequences and between the GARP or GCT domains of GLK proteins were determined using MatGAT (Matrix Global Alignment Tool) software (BMC Bioinformatics. 2003 4:29. MatGAT: an application that generates similarity/identity matrices using protein or DNA sequences. Campanella J J, Bitincka L, Smalley J; software hosted by Ledion Bitincka). MatGAT software generates similarity/identity matrices for DNA or protein sequences without needing pre-alignment of the data. The program performs a series of pair-wise alignments using the Myers and Miller global alignment algorithm (with a gap opening penalty of 12, and a gap extension penalty of 2), calculates similarity and identity using for example Blosum 62 (for polypeptides), and then places the results in a distance matrix. Sequence similarity is shown in the bottom half of the dividing line and sequence identity is shown in the top half of the diagonal dividing line.

[0826] The GARP and GCT domains were delineated using a multiple alignment and the obtained sequences are listed in Tables R and S. Results of the software analysis are shown in Tables T to V for the similarity and identity over the full-length protein sequences and for the GARP or GCT domains of the GLK polypeptides. The sequence of SEQ ID NO: 157 is indicated as number 6 (OsGLK1) in the matrices. Percentage identity is given above the diagonal (in bold) and percentage similarity is given below the diagonal (normal font). Percentage identity between full-length sequences of GLK paralogues and orthologues of SEQ ID NO: 157 ranges between 30% and 98.7%. These percentages are considerably higher when the sequence of the GARP domain is used instead of the full-length sequence.

TABLE R

sequences of the GARP domains as obtained upon alignment of
the proteins sequences and used in the MATGAT analysis:

| | |
|---|---|
| ZmG2 | KVKVDWTPELHRRFVQAVEQLGIDKAVPSRILEIMGTDCLTRHNIASHLQKYRSHR |
| ZmGLK1 | KAKVDWTPELHRRFVQAVEELGIDKAVPSRILEIMGIDSLTRHNIASHLQKYRSHR |
| OsGLK2 | KVKVDWTPELHRRFVQAVEQLGIDKAVPSRILELMGIECLTRHNIASHLQKYRSHR |
| PpGLK2 | KAKVDWTPELHRRFVHAVEQLGVEKAYPSRILELMGVQCLTRHNIASHLQKYRSHR |
| PpGlk1 | KAKVDWTPELHRRFVHAVEQLGVEKAFPSRILELMGVQCLTRHNIASHLQKYRSHR |
| OsGLK1 | KAKVDWTPELHRRFVQAVEQLGIDKAVPSRILEIMGIDSLTRHNIASHLQKYRSHR |
| AtGLK2 | KPKVDWTPELHRKFVQAVEQLGVDKAVPSRILEIMNVKSLTRHNVASHLQKYRSHR |
| AtGLK1 | KVKVDWTPELHRRFVEAVEQLGVDKAVPSRILELMGVHCLTRHNVASHLQKYRSHR |
| AcGLK1 | KAKVDWTPELHRRFVQAVEQLGVDKAVPSRILELMGIDCLTRHNIASHLQKYRSHR |

TABLE S

sequences of the GCT domains as obtained upon alignment of the
proteins sequences and used in the MATGAT analysis:

| | |
|---|---|
| ZmG2 | KHLMAREAEAATWAQKRHMYAPPAPRTTTTTDAARPPWVVPTTIGFPPPRFCRPLHVWGHPP |
| | PHAAAAEAAAATPMLPVWPRHLAPPRHLAPWAHPTPVDPAFWHQQYSAARKWGPQAAAVTQG |
| | TPCVPLPRFPVPHPIYSRPAMVPPPPSTTKLAQLHLELQAHPSKESIDAAIGDVLVKPWLPL |
| | PLGLKPPSLDSVMSELHKQGVPKIPPAAATTTGATG |
| ZmGLK1 | KHMLAREVEAATWTTHRRPMYAAPSGAVKRPDSNAWTVPTIGFPPPAGTPPRPVQHFGRPLH |
| | VWGHPSPTPAVESPRVPMWPRHLAPRAPPPPPWAPPPPADPASFWHHAYMR PAAHMPDQVA |
| | VTPCVAVPMAAARFPAPHVRGSLPWPPPMYRPLVPPALAGKSQQDALFQLQIQPSSESIDAA |
| | IGDVLTKPWLPLPLGLKPPSVDSVMGELQRQGVANVPQACG |
| OsGLK2 | KHLMAREAEAASWTQKRQMYTAAAAAAAVAAGGGPRKDAAAATAAVAPWVMPTIGFPPPHAA |
| | AMVPPPPHPPPFCRPPLHVWGHPTAGVEPTTAAAPPPPSPHAQPPLLPVWPRHLAPPPPPLP |
| | AAWAHGHQPAPVDPAAYWQQQYNLQRFPVPPVPGMVPHPMYRPIPPPSPPQGNKLAALQLQL |
| | DAHPSKESIDAAIGDVLVKPWLPLPLGLKPPSLDSVMSELHKQGIPKVPPAASGAAG |
| PpGLK2 | RHLAAREAEAASWTHRRTYTQAPWPRSSRRDGLPYLVPIHTPHIQPRPSMAMAMQPQLQTPH |
| | HPISTPLKVWGYPTVDHSNVHMWQQPAVATPSYWQAADGSYWQHPATGYDAFSARACYSHPM |
| | QRVPVTTTHAGLPIVAPGFPDESCYYGDDMLAGSMYLCNQSYDSEIGRAAGVAACSKPIETH |
| | LSKEVLDAAIGEALANPWTPPPLGLKPPSMEGVIAELQRQGINTVPPSTC |
| PpGlk1 | RHLAAREAEAASWTHRRAYTQMPWSRSSRRDGLPYLVPLHTPHIQPRPSMVMAMQPQLQTQH |
| | TPVSTPLKVWGYPTVDHSSVHMWQQPAVATPSYWQAPDGSYWQHPATNYDAYSARACYPHPM |
| | RVSLGTTHAGSPMMAPGFPDESYYGEDVLAATMYLCNQSYDSELGRAAGVAACSKPPETHLS |
| | KEVLDAAIGEALANPWTPPPLGLKPPSMEGVIAELQRQGINTVPPSTC |
| OsGLK1 | KHMIAREAEAASWTQRRQIYAAGGGAVAKRPESNAWTVPTIGFPPPPPPPPSPAPMQHFARP |
| | LHVWGHPTMDPSRVPVWPPRHLVPRGPAPPWVPPPPPSDPAFWHHPYMRGPAHVPTQGTPCM |
| | AMPMPAARFPAPPVPGVVPCPMYRPLTPPALTSKNQQDAQLQLQVQPSSESIDAAIGDVLSK |
| | PWLPLPLGLKPPSVDSVMGELQRQGVANVPPACG |
| AtGLK2 | KHLLAREAEAASWNLRRHATVAVPGVGGGGKKPWTAPALGYPPHVAPMHHGHFRPLHVWGHP |
| | TWPKHKPNTPASAHRTYPMPAIAAAPASWPGHPPYWHQQPLYPQGYGMASSNHSSIGVPTRQ |
| | LGPTNPPIDIHPSNESIDAAIGDVISKPWLPLPLGLKPPSVDGVMTELQRQGVSNVPPLP |
| AtGLK1 | KHLLAREAEAANWTRKRHIYGVDTGANLNGRTKNGWLAPAPTLGFPPPPPVAVAPPPVHHHH |
| | FRPLHVWGHPTVDQSIMPHVWPKHLPPPSTAMPNPPFWVSDSPYWHPMHNGTTPYLPTVATR |
| | FRAPPVAGIPHALPPHHTMYKPNLGFGGARPPVDLHPSKESVDAAIGDVLTRPWLPLPLGLN |
| | PPAVDGVMTELHRHGVSEVPPTASCA |

TABLE T
MATGAT matrix of full length sequences

| | 1 | 2 | 3 | 4 | 5 | 6 | 7 | 8 | 9 |
|---|---|---|---|---|---|---|---|---|---|
| 1. ZmG2 | | 43.9 | 53.6 | 29.4 | 29.7 | 45.0 | 38.8 | 40.0 | 44.8 |
| 2. ZmGLK1 | 54.3 | | 42.1 | 32.0 | 33.2 | 68.3 | 39.5 | 40.9 | 68.5 |
| 3. OsGLK2 | 63.2 | 54.8 | | 32.9 | 31.3 | 46.9 | 37.6 | 40.5 | 46.9 |
| 4. PpGLK2 | 43.5 | 45.1 | 46.8 | | 78.7 | 33.3 | 31.3 | 34.3 | 33.5 |
| 5. PpGIk1 | 42.9 | 44.4 | 43.5 | 85.1 | | 33.6 | 30.9 | 32.9 | 34.2 |
| 6. OsGLK1 | 57.7 | 75.6 | 56.5 | 45.5 | 46.4 | | 40.7 | 45.1 | 98.7 |
| 7. AtGLK2 | 49.5 | 49.9 | 47.0 | 42.2 | 41.9 | 50.8 | | 46.1 | 40.3 |
| 8. AtGLK1 | 51.8 | 52.2 | 52.0 | 45.8 | 43.6 | 58.7 | 58.6 | | 45.1 |
| 9. OsGLK1var | 57.9 | 75.6 | 56.7 | 44.5 | 46.8 | 99.3 | 50.5 | 58.7 | |

TABLE U
MATGAT matrix of GARP domains

| | 1 | 2 | 3 | 4 | 5 | 6 | 7 | 8 | 9 |
|---|---|---|---|---|---|---|---|---|---|
| 1. ZmG2 | | 92.9 | 94.6 | 85.7 | 85.7 | 94.6 | 85.7 | 89.3 | 92.9 |
| 2. ZmGLK1 | 94.6 | | 91.1 | 83.9 | 83.9 | 98.2 | 85.7 | 83.9 | 92.9 |
| 3. OsGLK2 | 98.2 | 96.4 | | 87.5 | 87.5 | 92.9 | 83.9 | 91.1 | 94.6 |
| 4. PpGLK2 | 91.1 | 92.9 | 94.6 | | 98.2 | 85.7 | 82.1 | 89.3 | 91.1 |
| 5. PpGlk1 | 91.1 | 92.9 | 94.6 | 100.0 | | 85.7 | 82.1 | 89.3 | 91.1 |
| 6. OsGLK1 | 94.6 | 100.0 | 96.4 | 92.9 | 92.9 | | 87.5 | 85.7 | 94.6 |
| 7. AtGLK2 | 91.1 | 94.6 | 94.6 | 91.1 | 91.1 | 94.6 | | 87.5 | 85.7 |
| 8. AtGLK1 | 96.4 | 94.6 | 98.2 | 92.9 | 92.9 | 94.6 | 92.9 | | 91.1 |
| 9. AcGLK1 | 96.4 | 98.2 | 98.2 | 94.6 | 94.6 | 98.2 | 92.9 | 96.4 | |

TABLE V
MATGAT matrix of GCT domains

| | 1 | 2 | 3 | 4 | 5 | 6 | 7 | 8 |
|---|---|---|---|---|---|---|---|---|
| 1. ZmG2 | | 48.2 | 56.3 | 26.7 | 28.5 | 47.6 | 38.0 | 37.0 |
| 2. ZmGLK1 | 58.6 | | 44.0 | 32.4 | 33.9 | 72.7 | 41.0 | 44.3 |
| 3. OsGLK2 | 65.0 | 57.6 | | 33.6 | 32.0 | 51.6 | 40.6 | 42.5 |
| 4. PpGLK2 | 41.9 | 47.0 | 44.0 | | 88.6 | 32.4 | 33.8 | 35.0 |
| 5. PpGlk1 | 42.3 | 45.7 | 42.4 | 93.2 | | 35.2 | 32.6 | 34.5 |
| 6. OsGLK1 | 61.3 | 81.1 | 60.5 | 44.1 | 49.6 | | 44.2 | 48.9 |
| 7. AtGLK2 | 48.6 | 48.5 | 48.6 | 43.2 | 43.2 | 52.3 | | 47.3 |
| 8. AtGLK1 | 50.9 | 55.5 | 54.7 | 49.2 | 46.6 | 61.8 | 57.1 | |

### Example 23

### Cloning of the Nucleic Acid Sequence Used in the Methods of the Invention

[0827] DNA manipulation: unless otherwise stated, recombinant DNA techniques are performed according to standard protocols described in (Sambrook (2001) Molecular Cloning: a laboratory manual, 3rd Edition Cold Spring Harbor Laboratory Press, CSH, New York) or in Volumes 1 and 2 of Ausubel et al. (1994), Current Protocols in Molecular Biology, Current Protocols. Standard materials and methods for plant molecular work are described in Plant Molecular Biology Labfax (1993) by R. D. D. Croy, published by BIOS Scientific Publications Ltd (UK) and Blackwell Scientific Publications (UK).

[0828] The nucleic acid sequence used in the methods of the invention was amplified by PCR using as template a custom-made Oryza sativa seedlings cDNA library (in pCMV Sport 6.0; Invitrogen, Paisley, UK). PCR was performed using Hifi Taq DNA polymerase in standard conditions, using 200 ng of template in a 50 μl PCR mix. The primers used were prm2251 (SEQ ID NO: 158; sense, start codon in bold:

5′ ggggacaagtttgtacaaaaaagcaggcttcacaatgcttgccgtgt
cgc 3′)

and prm2252 (SEQ ID NO: 159; reverse, complementary:

5′ ggggaccactttgtacaagaaagctgggtaatatcatccacacgctg
ga 3′),

which include the AttB sites for Gateway recombination. The amplified PCR fragment was purified also using standard methods. The first step of the Gateway procedure, the BP reaction, was then performed, during which the PCR fragment recombines in vivo with the pDONR201 plasmid to produce, according to the Gateway terminology, an “entry clone”, p034. Plasmid pDONR201 was purchased from Invitrogen, as part of the Gateway® technology.

### Example 24

### Expression Vector Construction

[0829] The entry clone p031 was subsequently used in an LR reaction with p00640, a destination vector used for Oryza sativa transformation. This vector contains as functional elements within the T-DNA borders: a plant selectable marker; a screenable marker expression cassette; and a Gateway cassette intended for LR in vivo recombination with the nucleic acid sequence of interest already cloned in the entry clone. A rice non-viral constitutive promoter, the GOS2 promoter (SEQ ID NO: 58) (PRO0129) was located upstream of this Gateway cassette.

[0830] After the LR recombination step, the resulting expression vector p045 (FIG. 14) was transformed into Agrobacterium strain LBA4044 and subsequently to Oryza sativa plants. Transformed rice plants were allowed to grow and were then examined for the parameters described below.

### Example 25

### Evaluation Procedure

### 25.1 Evaluation Setup

[0831] Approximately 30 independent T0 rice transformants were generated. The primary transformants were transferred from a tissue culture chamber to a greenhouse for growing and harvest of T1 seed. Four events, of which the T1 progeny segregated 3:1 for presence/absence of the transgene, were retained. For each of these events, approximately 10 T1 seedlings containing the transgene (hetero- and homo-zygotes) and approximately 10 T1 seedlings lacking the transgene (nullizygotes) were selected by monitoring visual marker expression. The transgenic plants and the corresponding nullizygotes were grown side-by-side at random positions. Greenhouse conditions were of shorts days (12 hours light), 28° C. in the light and 22° C. in the dark, and a relative humidity of 70%.

[0832] The four T1 events were further evaluated in the T2 generation following the same evaluation procedure as for the T1 generation but with more individuals per event. From the stage of sowing until the stage of maturity the plants were passed several times through a digital imaging cabinet. At each time point digital images (2048×1536 pixels, 16 million colours) were taken of each plant from at least 6 different angles.

25.2 Statistical Analysis: t-Test and F-Test

[0833] A two factor ANOVA (analysis of variants) was used as a statistical model for the overall evaluation of plant phenotypic characteristics. An F-test was carried out on all the parameters measured of all the plants of all the events transformed with the gene of the present invention. The F-test was carried out to check for an effect of the gene over all the transformation events and to verify for an overall effect of the gene, also known as a global gene effect. The threshold for significance for a true global gene effect was set at a 5% probability level for the F-test. A significant F-test value points to a gene effect, meaning that it is not only the mere presence or position of the gene that is causing the differences in phenotype.

### Example 26

### Evaluation Results

[0834] The plant aboveground area (or leafy biomass) was determined by counting the total number of pixels on the digital images from aboveground plant parts discriminated from the background. This value was averaged for the pictures taken on the same time point from the different angles and was converted to a physical surface value expressed in square mm by calibration. Experiments show that the aboveground plant area measured this way correlates with the biomass of plant parts above ground. The above ground area is the time point at which the plant had reached its maximal leafy biomass.

[0835] The mature primary panicles were harvested, counted, bagged, barcode-labeled and then dried for three days in an oven at 37° C. The panicles were then threshed and all the seeds were collected and counted. The filled husks were separated from the empty ones using an air-blowing device. The empty husks were discarded and the remaining fraction was counted again. The filled husks were weighed on an analytical balance. The number of filled seeds was determined by counting the number of filled husks that remained after the separation step. The total seed yield was measured by weighing all filled husks harvested from a plant.

[0836] As presented in Tables W to Y, the aboveground biomass, the seed yield and the number of filled seeds are increased in the transgenic plants with increased expression of a nucleic acid encoding a GLK protein, compared to suitable control plants. Results from the T1 and the T2 generations are shown.

[0837] Table W shows the increase in aboveground biomass in percent, as well as the statistical relevance of this increase according to the F-test, in the T1 and T2 generation of transgenic rice with increased expression of a nucleic acid encoding a GLK protein.

TABLE W
Aboveground biomass

| | % Difference | P value of F test |
|---|---|---|
| T1 generation | 12 | 0.0018 |
| T2 generation | 27 | 0.0000 |

[0838] Table X shows the increase in total seed yield (total seed weight) in percent, as well as the statistical relevance of this increase according to the F-test, in the T1 and T2 generation of transgenic rice with increased expression of a nucleic acid encoding a GLK protein.

TABLE X
Seed yield

| | % Difference | P value of F test |
|---|---|---|
| T1 generation | 20 | 0.0048 |
| T2 generation | 20 | 0.0160 |

[0839] Table Y shows the increase in the number of filled seeds in percent, as well as the statistical relevance of this increase according to the F-test, in the T1 and T2 generation of transgenic rice with increased expression of a nucleic acid encoding a GLK protein.

TABLE Y
Number of filled seeds

| | % Difference | P value of F test |
|---|---|---|
| T1 generation | 22 | 0.0021 |
| T2 generation | 22 | 0.0065 |

### REV ΔHDZip/START

### Example 27

### Identification of Sequences Related to the Nucleic Acid Sequence Used in the Methods of the Invention

[0840] Sequences (full length cDNA, ESTs or genomic) related to the nucleic acid sequence used in the methods of the present invention were identified amongst those maintained in the Entrez Nucleotides database at the National Center for Biotechnology Information using database sequence search tools, such as the Basic Local Alignment Tool (BLAST) (Altschul et al. (1990) J. Mol. Biol. 215:403-410; and Altschul et al. (1997) Nucleic Acids Res. 25:3389-3402). The program is used to find regions of local similarity between sequences by comparing nucleic acid or polypeptide sequences to sequence databases and by calculating the statistical significance of matches. The polypeptide encoded by the nucleic acid sequence of the present invention was used for the TBLASTN algorithm, with default settings and the filter to ignore low complexity sequences set off. The output of the analysis was viewed by pairwise comparison, and ranked according to the probability score (E-value), where the score reflects the probability that a particular alignment occurs by chance (the lower the E-value, the more significant the hit). In addition to E-values, comparisons were also scored by percentage identity. Percentage identity refers to the number of identical nucleotides (or amino acids) between the two compared nucleic acid (or polypeptide) sequences over a particular length. In some instances, the default parameters may be adjusted to modify the stringency of the search

[0841] Table Z provides a list of nucleic acid sequences related to the nucleic acid sequence used in the methods of the present invention.

TABLE Z
Nucleic acid sequences related to the nucleic acid sequence
(SEQ ID NO: 194) used in the methods of the present invention,
and the corresponding deduced polypeptides.

| | | Nucleic | | |
|---|---|---|---|---|
| | | acid | | database |
| | source | SEQ | Polypeptide | accession |
| Name | organism | ID NO: | SEQ ID NO: | number |
| Orysa_REV | Oryza sativa | 194 | 195 | Part of |
| partial | | | | AK102830 |
| CTR | | | | (Os10g33960) |
| Orysa_REV | Oryza sativa | 196 | 197 | Part of |
| CTR | | | | AK102830 |
| | | | | (Os10g33960) |
| Orysa_Rev | Oryza sativa | 198 | 199 | AK102830 |
| | | | | (Os10g33960) |
| Orysa_HOX10 | Oryza sativa | 200 | 201 | AY425991.1 |
| Arath_REV | Arabidopsis | 202 | 203 | AF188994 |
| | thaliana | | | |
| Zeama_HDIII | Zea mays | 204 | 205 | AY501430.1 |
| RLD1 | | | | |
| (rolled leaf1) | | | | |
| Poptr_HDIII | Populus | 206 | 207 | AY919617 |
| | trichocarpa | | | |
| Medtr_HDIII | Medicago | 208 | 209 | Spliced from |
| | trunculata | | | AC138171.17 |
| Sacof_HDIII | Saccharum | 210 | 211 | contig of |
| Partial | officinarum | | | CA125167.1 |
| | | | | CA217027.1 |
| | | | | CA241276.1 |
| | | | | CA124509.1 |
| Triae_HDIII | Triticum | 212 | 213 | contig of |
| Partial | aestivum | | | CD905903 |
| | | | | BM135681.1 |
| | | | | BQ578798.1 |
| | | | | CJ565259.1 |
| Horvu_HDIII | Hordeum | 214 | 215 | compiled from |
| Partial | vulgare | | | BU996988.1 |
| | | | | BJ452342.1 |
| | | | | BJ459891.1 |
| Phypr_HDIII | Phyllostachys | 216 | 217 | DQ013803 |
| Partial | praecox | | | |
| Orysa_REV | Oryza sativa | 223 | | Variant of SEQ |
| | | | | ID NO: 196 |
| Brara | Brassica rapa | 224 | 225 | AC189324.1 |
| Revoluta | | | | |
| Ginbi | Ginkgo biloba | 226 | 227 | DQ385525 |
| Revoluta | | | | |
| Gosba | Gossypium | 228 | 229 | AY966446.1 |
| Revoluta | barbadense | | | |
| Lyces | Lycopersicon | 230 | 231 | BT013577 |
| Revoluta | esculentum | | | |

### Example 28

### Determination of Global Similarity and Identity Between the CTR of REV Polypeptides

[0842] Global percentages of similarity and identity between the CTR of REV polypeptides were determined using one of the methods available in the art, the MatGAT (Matrix Global Alignment Tool) software (BMC Bioinformatics. 2003 4:29. MatGAT: an application that generates similarity/identity matrices using protein or DNA sequences. Campanella J J, Bitincka L, Smalley J; software hosted by Ledion Bitincka). MatGAT software generates similarity/identity matrices for DNA or protein sequences without needing pre-alignment of the data. The program performs a series of pair-wise alignments using the Myers and Miller global alignment algorithm (with a gap opening penalty of 12, and a gap extension penalty of 2), calculates similarity and identity using for example Blosum 62 (for polypeptides), and then places the results in a distance matrix. Sequence similarity is shown in the bottom half of the dividing line and sequence identity is shown in the top half of the diagonal dividing line.

Parameters used in the comparison were:
[0843] Scoring matrix: Blosum62
[0844] First Gap: 12
[0845] Extending gap: 2

[0846] Results of the software analysis are shown in Table AA for the global similarity and identity between the CTR of REV polypeptides. Percentage identity is given above the diagonal and percentage similarity is given below the diagonal. Percentage identity between the CTR of REV polypeptide paralogues and orthologues ranges between 30 and 70%, reflecting the lower sequence identity conservation between them outside of the HDZip and START domains.

TABLE AA
MatGAT results for global similarity and identity between the CTR of REV
polypeptide orthologues and paralogues.

| Global similarity and identity over | | | | | | | | | | |
|---|---|---|---|---|---|---|---|---|---|---|
| the CTR of REV polypeptide | | | | | | | | | | |
| orthologues and paralogues | 1 | 2 | 3 | 4 | 5 | 6 | 7 | 8 | 9 | 10 |
| 1. CTR_Horvu_HDIII | | 61.1 | 57.2 | 81.1 | 88.2 | 89.7 | 60 | 79.6 | 96.5 | 79.8 |
| 2. CTR_Arath_REV | 76.9 | | 70 | 61.8 | 63 | 63.2 | 73.3 | 62.5 | 62.9 | 63.4 |
| 3. CTR_Medtr_REV | 73.2 | 86.5 | | 59.2 | 60.3 | 60.8 | 70.2 | 59.4 | 58.6 | 60.3 |
| 4. CTR_Orysa_HOX10 | 89 | 80.7 | 76.6 | | 83.9 | 84.8 | 59.8 | 88.2 | 83 | 89.7 |
| 5. CTR_Orysa_REV | 93.5 | 79.6 | 76.2 | 92.5 | | 92.7 | 61.9 | 83.2 | 90.7 | 83.9 |
| 6. CTR_Phypr_HDIII | 93.3 | 79.8 | 76.2 | 92.7 | 96.3 | | 61.9 | 84.5 | 91.8 | 84.2 |
| 7. CTR_Poptr_HDIII | 75.1 | 86.4 | 82.8 | 76.1 | 76.1 | 76.5 | | 60.4 | 61.6 | 61.3 |
| 8. CTR_Sacof_HDIII | 88.6 | 80.3 | 75.9 | 94.2 | 91.8 | 91.8 | 77.4 | | 81.9 | 94.8 |
| 9. CTR_Triae_HDIII | 97.4 | 79 | 74.9 | 90.8 | 95.7 | 95.1 | 76.3 | 90.5 | | 81.8 |
| 10. CTR_Zeama_HDIII_LRD1 | 88.8 | 81.3 | 77.8 | 95.7 | 92.5 | 92.3 | 77.8 | 97 | 90.6 | |

[0847] All REV polypeptides comprise a CTR having, in increasing order of preference, at least 50%, 55%, 60%, 65%, 70%, 75%, 80%, 85%, 90%, 95% or 98% sequence identity to the CTR of a REV polypeptide as represented by SEQ ID NO: 197.

### Example 29

### Gene Cloning

[0848] DNA manipulation: unless otherwise stated, recombinant DNA techniques are performed according to standard protocols described in (Sambrook (2001) Molecular Cloning: a laboratory manual, 3rd Edition, Cold Spring Harbor Laboratory Press, CSH, New York) or in Volumes 1 and 2 of Ausubel et al. (1994), Current Protocols in Molecular Biology, Current Protocols. Standard materials and methods for plant molecular work are described in Plant Molecular Biology Labfax (1993) by R. D. D. Croy, published by BIOS Scientific Publications Ltd (UK) and Blackwell Scientific Publications (UK).

[0849] The Oryza sativa Orysa_REV full-length gene SEQ ID NO: 198 was amplified by PCR using as template a custom-made Oryza sativa cDNA library (Invitrogen, Paisley, UK). After reverse transcription of RNA extracted from seedlings, the cDNAs were cloned into pCMV Sport 6.0. After plasmid extraction, 200 ng of template was used in a 50 μl PCR mix. Primers prmO1983 (SEQ ID NO: 221; sense, start codon in bold, AttB1 site in italic:

5′-ggggacaagtttgtacaaaaaagcaggcttaaacaatggcggcggcg
gtgg-3′)

and prm01984 (SEQ ID NO: 222; reverse, complementary, AttB2 site in italic:

5′-ggggaccactttgtacaagaaagctgggtggattttgggtcacacga
aggacca -3′),

which include the AttB sites for Gateway recombination, were used for PCR amplification. PCR was performed using Hifi Taq DNA polymerase in standard conditions. The amplified PCR fragment was purified also using standard methods. The first step of the Gateway procedure, the BP reaction, was then performed, during which the PCR fragment recombines with the pDONR201 plasmid to produce, according to the Gateway terminology, an “entry clone”, p04562. Plasmid pDONR201 was purchased from Invitrogen, as part of the Gateway® technology.

[0850] The Oryza sativa partial CTR (REV ΔHDZip/START) of the Orysa_REV gene SEQ ID NO: 194 was amplified by PCR as above, with primers prmO3263 (SEQ ID NO: 219:

5′ ggggacaagtttgtacaaaaaagcaggcttgtgctaaggcatccatg
ctac3′)

and prmO3264 (SEQ ID NO: 220:

5′ ggggaccactttgtacaagaaagctgggtgcaccttccatgctacag
cttg3′).

[0851] After cloning, the resulting entry clone number was p04436.

### Example 30

### Vector Construction

[0852] The entry clones p04562 and p04436 were subsequently used in an LR reaction with p01519, a destination vector used for Oryza sativa transformation for the hairpin construct. This vector contain as functional elements within the T-DNA borders: a plant selectable marker; a screenable marker expression cassette; and two Gateway cassettes cloned as inverted repeats and separated by a MAR (fragment of around 300 bp of a Nicotiana tabacum matrix attachment region), intended for LR in vivo recombination such that the sequence of interest from the entry clone is integrated in both sense and antisense orientations to form the hairpin secondary structure. A rice GOS2 promoter (SEQ ID NO: 58) for constitutive expression of the genetic construct (PRO0129) was located upstream of these Gateway cassettes.

[0853] After the LR recombination step, the resulting expression vectors, p0443 (with the partial CTR of Orysa_REV; SEQ ID NO: 194) and p0448 (with the full length Orysa_REV; comprised in SEQ ID NO: 198) (see FIG. 20) were separately transformed into Agrobacterium strain LBA4044, and subsequently separately to Oryza sativa plants. Transformed rice plants were allowed to grow and were then examined for the parameters described in Example 31.

### Example 31

### Evaluation Procedure

### 31.1 Evaluation Setup

[0854] Approximately 15 to 20 independent T0 rice transformants were generated. The primary transformants were transferred from a tissue culture chamber to a greenhouse for growing and harvest of T1 seed. Five events for the hairpin construct comprising the full length Orysa_REV and six events for the hairpin construct comprising the partial CTR of the Orysa_REV, of which the T1 progeny segregated 3:1 for presence/absence of the transgene, were retained. For each of these events, approximately 10 T1 seedlings containing the transgene (hetero- and homozygotes) and approximately 10 T1 seedlings lacking the transgene (nullizygotes) were selected by monitoring visual marker expression. The selected T1 plants were transferred to a greenhouse. Each plant received a unique barcode label to link unambiguously the phenotyping data to the corresponding plant. The selected T1 plants were grown on soil in 10 cm diameter pots under the following environmental settings: photoperiod=11.5 h, daylight intensity=30,000 lux or more, daytime temperature=28° C. or higher, night time temperature=22° C., relative humidity=60-70%. Transgenic plants and the corresponding nullizygotes (control plants) were grown side-by-side at random positions.

[0855] Five T1 events were further evaluated (if positive results were obtained in the first evaluation) in the T2 generation following the same evaluation procedure as for the T1 generation but with more individuals per event. From the stage of sowing until the stage of maturity the plants were passed several times through a digital imaging cabinet. At each time point digital images (2048×1536 pixels, 16 million colours) were taken of each plant from at least 6 different angles.

### 31.2 Statistical Analysis: F-Test

[0856] A two factor ANOVA (analysis of variants) was used as a statistical model for the overall evaluation of plant phenotypic characteristics. An F-test was carried out on all the parameters measured of all the plants of all the events transformed with the gene of the present invention. The F-test was carried out to check for an effect of the gene over all the transformation events and to verify for an overall effect of the gene, also known as a global gene effect. The threshold for significance for a true global gene effect was set at a 5% probability level for the F-test. A significant F-test value points to a gene effect, meaning that it is not only the mere presence or position of the gene that is causing the differences in phenotype.

### Example 32

### Evaluation Results

[0857] The plant aboveground area (or leafy biomass) was determined by counting the total number of pixels on the digital images from aboveground plant parts discriminated from the background. This value was averaged for the pictures taken on the same time point from the different angles and was converted to a physical surface value expressed in square mm by calibration. Experiments show that the aboveground plant area measured this way correlates with the biomass of plant parts above ground. The above ground area is the time point at which the plant had reached its maximal leafy biomass.

[0858] The plant parts below ground (in this case essentially the roots) were determined by growing the plants in specially designed pots with transparent bottoms to allow visualization of the roots. A digital camera recorded images through the bottom of the pot during plant growth. Root features such as total projected area (which can be correlated to total root volume), average diameter and length of roots above a certain thickness threshold (length of thick roots, or thick root length) were deduced from the picture using of appropriate software.

[0859] The mature primary panicles were harvested, counted, bagged, barcode-labeled and then dried for three days in an oven at 37° C. The panicles were then threshed and all the seeds were collected and counted. The filled husks were separated from the empty ones using an air-blowing device. The empty husks were discarded and the remaining fraction was counted again. The filled husks were weighed on an analytical balance. The number of filled seeds was determined by counting the number of filled husks that remained after the separation step. The total seed yield was measured by weighing all filled husks harvested from a plant. Total seed number per plant was measured by counting the number of husks harvested from a plant. Thousand kernel weight (TKW) is extrapolated from the number of filled seeds counted and their total weight. Individual seed parameters (including width, length, area, weight) were measured using a custom-made device consisting of two main components, a weighing and imaging device, coupled to software for image analysis. The harvest index (HI) in the present invention is defined as the ratio between the total seed yield and the above ground area (mm²), multiplied by a factor 10⁶. The total number of flowers per panicle as defined in the present invention is the ratio between the total number of seeds and the number of mature primary panicles. The seed fill rate as defined in the present invention is the proportion (expressed as a %) of the number of filled seeds over the total number of seeds (or florets).

32.1 Measurement of Yield-Related Parameters for Transformants with Reduced Expression of an Endogenous REV Gene Using a REV ΔHDZip/START Nucleic Acid Sequence as Represented by SEQ ID NO: 194

[0860] As presented in Tables BB to EE, the seed yield, the number of filled seeds, the seed fill rate and the harvest index are increased in the transgenic plants with reduced expression of an endogenous REV gene using a REV ΔHDZip/START nucleic acid sequence compared to control plants. Results from the T1 and the T2 generations are shown.

[0861] Table BB shows the number of transgenic events with an increase in total seed yield (total seed weight), the percentage of this increase, as well as the statistical relevance of this increase according to the F-test.

TABLE BB
Number of transgenic events with an increase in seed yield, the
percentage of the increase, and P value of the F-test in T1 and T2
generation of transgenic rice with reduced expression of an endogenous
REV gene using a REV ΔHDZip/START nucleic acid sequence.
Seed weight

| | Number of events | % | P value of |
|---|---|---|---|
| | showing an increase | Difference | F test |
| T1 generation | 4 out of 6 | 16 | 0.058 |
| T2 generation | 3 out of 4 | 4 | 0.0133 |

[0862] Table CC shows the number of transgenic events with an increase in the number of filled seeds, the percentage of this increase, as well as the statistical relevance of this increase according to the F-test.

TABLE CC
Number of transgenic events with an increase in number of filled
seeds, the percentage of the increase, and P value of the F-test in
T1 and T2 generation of transgenic rice with reduced expression
of an endogenous REV gene using a REV ΔHDZip/START
nucleic acid sequence.
Number of filled seeds

| | Number of events | % | P value of |
|---|---|---|---|
| | showing an increase | Difference | F test |
| T1 generation | 4 out of 6 | 14 | 0.0884 |
| T2 generation | 3 out of 4 | 4 | 0.0156 |

[0863] Table DD shows the number of transgenic events with an increase in the seed fill rate, the percentage of this increase, as well as the statistical relevance of this increase according to the F-test.

TABLE DD
Number of transgenic events with an increase in seed fill rate, the
percentage of the increase, and P value of the F-test in T1 and T2
generation of transgenic rice with reduced expression of an endogenous
REV gene using a REV ΔHDZip/START nucleic acid sequence.
Seed fill rate

| | Number of events | % | P value of |
|---|---|---|---|
| | showing an increase | Difference | F test |
| T1 generation | 5 out of 6 | 19 | 0.0002 |
| T2 generation | 4 out of 4 | 22 | <0.0001 |

[0864] Table EE shows the number of transgenic events with an increase in the harvest index, the percentage of this increase, as well as the statistical relevance of this increase according to the F-test.

TABLE EE
Number of transgenic events with an increase in harvest index,
the percentage of the increase, and P value of the F-test in T1 and T2
generation of transgenic rice with reduced expression of an endogenous
REV gene using a REV ΔHDZip/START nucleic acid sequence.
Harvest index

| | Number of events | % | P value of |
|---|---|---|---|
| | showing an increase | Difference | F test |
| T1 generation | 4 out of 6 | 14 | 0.0284 |
| T2 generation | 3 out of 4 | 9 | 0.0187 |

[0865] Two additional parameters were measured for only one evaluation:
[0866] 1) the average individual seed length
[0867] 2) the average root thickness

[0868] As shown on Table FF, both the average individual seed length and the average root thickness were significantly increased in transgenic rice with reduced expression of an endogenous REV gene using a REV ΔHDZip/START nucleic acid sequence compared to control plants.

TABLE FF
Number of transgenic events with an increase in harvest index and
P value of the F-test in a single generation of transgenic rice with
reduced expression of an endogenous REV gene using a REV
ΔHDZip/START nucleic acid sequence.

| | Number of events showing | |
|---|---|---|
| | an increase | P value of F test |
| Average individual seed | 5 out of 6 | 0.009 |
| length (T2 seeds) | | |
| Average root thickness | 4 out of 4 | <0.0001 |
| (T2 plants) | | |

32.2 Measurement of Yield-Related Parameters for Transformants with Reduced Expression of an Endogenous REV Polypeptide Using a Nucleic Acid Encoding the Full Length Orysa_REV Polypeptide, as Represented by SEQ ID NO: 198:

[0869] The same evaluation procedure as described hereinabove was performed for transgenic rice having reduced expression of an endogenous REV polypeptide using a nucleic acid sequence encoding the full length Orysa_REV polypeptide. All of the parameters measured were strongly and significantly negative, as shown in Table GG.

TABLE GG
Number of transgenic events with a DECREASE in aboveground
biomass, total seed yield, number of filled seeds, number of flowers
per panicle, harvest index, number of primary panicles and plant
height, the percentage of the increase, and P value of the F-test in
T1 generation of transgenic rice with reduced expression of an
endogenous REV gene using a nucleic acid sequence encoding
the full length Orysa_REV polypeptide.

| | Number of events | | P value |
|---|---|---|---|
| Parameter | showing a decrease | % Difference | of F test |
| Aboveground biomass | 5 out of 5 | −40 | <0.0001 |
| Total seed yield | 5 out of 5 | −65 | <0.0001 |
| Number of filled seeds | 5 out of 5 | −64 | <0.0001 |
| Number of flowers per | 5 out of 5 | −39 | <0.0001 |
| panicle | | | |
| Harvest index | 5 out of 5 | −53 | <0.0001 |
| Number of primary | 5 out of 5 | −39 | <0.0001 |
| panicles | | | |
| Plant height | 5 out of 5 | −13 | 0.0006 |

[0870] By including conserved regions in the hairpin construct (such as the HDZip and START domains) for reducing endogenous REV gene expression, the expression of other class III HDZip genes may also be reduced.

### CLE

### Example 33

### Identification of Sequences Related to the Nucleic Acid Sequence Used in the Methods of the Invention

[0871] Sequences (full length cDNA, ESTs or genomic) related to the nucleic acid sequence used in the methods of the present invention were identified amongst those maintained in the Entrez Nucleotides database at the National Center for Biotechnology Information using database sequence search tools, such as the Basic Local Alignment Tool (BLAST) (Altschul et al. (1990) J. Mol. Biol. 215:403-410; and Altschul et al. (1997) Nucleic Acids Res. 25:3389-3402). The program is used to find regions of local similarity between sequences by comparing nucleic acid or polypeptide sequences to sequence databases and by calculating the statistical significance of matches. The polypeptide encoded by the nucleic acid sequence of the present invention was used for the TBLASTN algorithm, with default settings and the filter to ignore low complexity sequences set off. The output of the analysis was viewed by pairwise comparison, and ranked according to the probability score (E-value), where the score reflects the probability that a particular alignment occurs by chance (the lower the E-value, the more significant the hit). In addition to E-values, comparisons were also scored by percentage identity. Percentage identity refers to the number of identical nucleotides (or amino acids) between the two compared nucleic acid (or polypeptide) sequences over a particular length. In some instances, the default parameters may be adjusted to modify the stringency of the search

[0872] Table HH provides a list of nucleic acid sequences related to the nucleic acid sequence used in the methods of the present invention.

TABLE HH
Nucleic acid sequences related to the nucleic acid sequence
(SEQ ID NO: 232) used in the methods of the present invention,
and the corresponding deduced polypeptides.

| | Nucleic acid | Protein |
|---|---|---|
| Plant Source | SEQ ID NO: | SEQ ID NO: |
| Saccharum officinarum CLE- | 232 | 233 |
| like | | |
| Populus trichocarpa X | 239 | 240 |
| Populus deltoides CLE-like | | |
| Oryza sativa CLE-like | 241 | 242 |
| Saccharum officinarum CLE- | 243 | 244 |
| like | | |
| Arabidopsis thaliana CLE2- | 245 | 246 |
| like | | |
| Brassica napus CLE-like | 247 | 248 |
| Arabidopsis thaliana | 249 | 250 |
| CLAVATA3 | | |

### Example 34

### Gene Cloning

[0873] The sugarcane CLE-like gene was amplified by PCR with primers prmO5843 (SEQ ID NO: 234; sense, start codon in bold, AttB1 site in italic:

5′-ggggacaagtttgtacaaaaaagcaggcttaaacaatgaggatgttc
ttccgg-3′)

and prm05844 (SEQ ID NO: 235; reverse, complementary, AttB2 site in italic:

5′-ggggaccactttgtacaagaaagctgggttcctctcatctgttgtgg
ag-3′),

which include the AttB sites for Gateway recombination, were used for PCR amplification. PCR was performed using Hifi Taq DNA polymerase in standard conditions. The PCR fragment was purified also using standard methods. The first step of the Gateway procedure, the BP reaction, was then performed, during which the PCR fragment recombines in vivo with the pDONR201 plasmid to produce, according to the Gateway terminology, an “entry clone”, p066. Plasmid pDONR201 was purchased from Invitrogen, as part of the Gateway® technology.

### Example 35

### Vector Construction

[0874] The entry clone p066 was subsequently used in an LR reaction with p01519, a destination vector used for Oryza sativa transformation for the antisense construct. This vectors contains as functional elements within the T-DNA borders: a plant selectable marker; a screenable marker expression cassette; and a Gateway cassette intended for LR in vivo recombination such that the sequence of interest from the entry clone is integrated in sense or anti sense orientation. A rice prolamine promoter (SEQ ID NO: 236) for seed specific expression (PRO090) was located upstream of this Gateway cassette.

[0875] After the LR recombination step, the resulting expression vector, p068 (FIG. 23) was transformed into Agrobacterium strain LBA4044 and subsequently to Oryza sativa plants. Transformed rice plants were allowed to grow and were then examined for the parameters described in Example 36.

### Example 36

### Evaluation Methods of Plants Transformed with CLE-Like in Anti Sense Orientation

[0876] Approximately 15 to 20 independent T0 rice transformants were generated. The primary transformants were transferred from a tissue culture chamber to a greenhouse for growing and harvest of T1 seed. Six events for which the T1 progeny segregated 3:1 for presence/absence of the transgene, were retained. For each of these events, approximately 10 T1 seedlings containing the transgene (hetero- and homozygotes) and approximately 10 T1 seedlings lacking the transgene (nullizygotes) were selected by monitoring visual marker expression. The selected T1 plants were transferred to a greenhouse. Each plant received a unique barcode label to link unambiguously the phenotyping data to the corresponding plant. The selected T1 plants were grown on soil in 10 cm diameter pots under the following environmental settings: photoperiod=11.5 h, daylight intensity=30,000 lux or more, daytime temperature=28° C., night time temperature=22° C., relative humidity=60-70%. Transgenic plants and the corresponding nullizygotes were grown side-by-side at random positions. From the stage of sowing until the stage of maturity the plants were passed several times through a digital imaging cabinet. At each time point digital images (2048×1536 pixels, 16 million colours) were taken of each plant from at least 6 different angles.

[0877] The plant aboveground area (or leafy biomass) was determined by counting the total number of pixels on the digital images from aboveground plant parts discriminated from the background. This value was averaged for the pictures taken on the same time point from the different angles and was converted to a physical surface value expressed in square mm by calibration. Experiments show that the aboveground plant area measured this way correlates with the biomass of plant parts above ground. The Areamax is the above ground area at the time point at which the plant had reached its maximal leafy biomass.

[0878] The mature primary panicles were harvested, bagged, barcode-labelled and then dried for three days in the oven at 37° C. The panicles were then threshed and all the seeds collected. The filled husks were separated from the empty ones using an air-blowing device. After separation, both seed lots were then counted using a commercially available counting machine. The empty husks were discarded. The filled husks were weighed on an analytical balance and the cross-sectional area of the seeds was measured using digital imaging. This procedure resulted in the set of the following seed-related parameters:

[0879] The flowers-per-panicle is a parameter estimating the average number of florets per panicle on a plant, derived from the number of total seeds divided by the number of first panicles. The tallest panicle and all the panicles that overlapped with the tallest panicle when aligned vertically, were considered as first panicles and were counted manually. The number of filled seeds was determined by counting the number of filled husks that remained after the separation step. The total seed yield (total seed weight) was measured by weighing all filled husks harvested from a plant. Total seed number per plant was measured by counting the number of husks harvested from a plant and corresponds to the number of florets per plant. These parameters were derived in an automated way from the digital images using image analysis software and were analysed statistically. Individual seed parameters (including width, length, area, weight) were measured using a custom-made device consisting of two main components, a weighing and imaging device, coupled to software for image analysis. The harvest index in the present invention is defined as the ratio between the total seed yield (g) and the above ground area (mm²), multiplied by a factor 10⁶.

[0880] A two factor ANOVA (analyses of variance) corrected for the unbalanced design was used as statistical model for the overall evaluation of plant phenotypic characteristics. An F-test was carried out on all the parameters measured of all the plants of all the events transformed with that gene. The F-test was carried out to check for an effect of the gene over all the transformation events and to verify for an overall effect of the gene, also named herein “global gene effect”. If the value of the F test shows that the data are significant, than it is concluded that there is a “gene” effect, meaning that not only presence or the position of the gene is causing the effect. The threshold for significance for a true global gene effect is set at 5% probability level for the F test.

[0881] To check for an effect of the genes within an event, i.e., for a line-specific effect, a t-test was performed within each event using data sets from the transgenic plants and the corresponding null plants. “Null plants” or “null segregants” or “nullizygotes” are the plants treated in the same way as the transgenic plant, but from which the transgene has segregated. Null plants can also be described as the homozygous negative transformed plants. The threshold for significance for the t-test is set at 10% probability level. The results for some events can be above or below this threshold. This is based on the hypothesis that a gene might only have an effect in certain positions in the genome, and that the occurrence of this position-dependent effect is not uncommon. This kind of gene effect is also named herein a “line effect of the gene”. The p-value is obtained by comparing the t-value to the t-distribution or alternatively, by comparing the F-value to the F-distribution. The p-value then gives the probability that the null hypothesis (i.e., that there is no effect of the transgene) is correct.

### Example 37

### Measurement of Yield-Related Parameters for Anti Sense Construct Transformants

[0882] Upon analysis of the seeds as described above, the inventors found that plants transformed with the anti sense CLE-like gene construct had a higher seed yield, expressed as number of filled seeds, total weight of seeds, total number of seeds and Harvest Index, compared to plants lacking the CLE-like transgene. In particular the total seed weight and total seed number was significantly increased in both the T1 and T2 generation plants.

### SYR NUE

### Example 38

### Identification of Sequences Related to SEQ ID NO: 251 and SEQ ID NO: 252

[0883] Sequences (full length cDNA, ESTs or genomic) related to SEQ ID NO: 251 and/or protein sequences related to SEQ ID NO: 252 were identified amongst those maintained in the Entrez Nucleotides database at the National Center for Biotechnology Information (NCBI) using database sequence search tools, such as the Basic Local Alignment Tool (BLAST) (Altschul et al. (1990) J. Mol. Biol. 215:403-410; and Altschul et al. (1997) Nucleic Acids Res. 25:3389-3402). The program is used to find regions of local similarity between sequences by comparing nucleic acid or polypeptide sequences to sequence databases and by calculating the statistical significance of matches. The polypeptide encoded by SEQ ID NO: 251 was used for the TBLASTN algorithm, with default settings and the filter to ignore low complexity sequences set off. The output of the analysis was viewed by pairwise comparison, and ranked according to the probability score (E-value), where the score reflects the probability that a particular alignment occurs by chance (the lower the E-value, the more significant the hit). In addition to E-values, comparisons were also scored by percentage identity. Percentage identity refers to the number of identical nucleotides (or amino acids) between the two compared nucleic acid (or polypeptide) sequences over a particular length. In some instances, the default parameters may be adjusted to modify the stringency of the search.

[0884] In addition to the publicly available nucleic acid sequences available at NCBI, proprietary sequence databases are also searched following the same procedure as described herein above.

[0885] Table II provides a list of nucleic acid and protein sequences related to the nucleic acid sequence as represented by SEQ ID NO: 251 and the protein sequence represented by SEQ ID NO: 252.

TABLE II
Nucleic acid sequences related to the nucleic acid sequence (SEQ ID NO: 251)
useful in the methods of the present invention, and the corresponding deduced polypeptides.

| | | Poly- | | Database | |
|---|---|---|---|---|---|
| | Source | peptide SEQ | Nucleic acid | accession | |
| Name | organism | ID NO: | SEQ ID NO: | number | Status |
| OsSYR | Oryza sativa | 252 | 251 | / | Full length |
| | | | | | or partial |
| rice SYR | Oryza sativa | 262 | 277 | XP_472637 | Full length |
| homologue 1 | | | | | |
| rice SYR | Oryza sativa | 263 | | AP008218 | Full length |
| homologue 2 | | | | | |
| corn SYR | Zea mays | 264 | 278 | AY110705 | partial |
| homologue | | | | | |
| wheat SYR | Triticum | 265 | | / | Full length |
| homologue | aestivum | | | | |
| barley SYR | Hordeum | 266 | 286 | CB871444 | Full length |
| homologue | vulgare | | | | |
| sugar cane SYR | Saccharum | 267 | 287 | CA165713 | partial |
| homologue 1 | officinarum | | | | |
| sugar cane SYR | Saccharum | 268 | 288 | CA242805 | Full length |
| homologue 2 | officinarum | | | | |
| sorghum SYR | Sorghum bicolor | 269 | 289 | CX611532 | Full length |
| homologue | | | | | |
| AtSYR | Arabidopsis | 270 | 290 | NM_115853 | Full length |
| homologue 1 | thaliana | | | | |
| AtSYR | Arabidopsis | 271 | 291 | NM_180078 | Full length |
| homologue 2 | thaliana | | | | |
| grape SYR | Vitis vinifera | 272 | 279 | CF404276 | Full length |
| homologue | | | | | |
| Citrus SYR | Citrus reticulata | 273 | 280 | CF830612 | partial |
| homologue | | | | | |
| tomato SYR | Lycopersicon | 274 | 282 | AI774560 | Full length |
| homologue 1 | esculentum | | | | |
| tomato SYR | Lycopersicon | 275 | 281 | BG125370 | Full length |
| homologue 2 | esculentum | | | | |

### Example 39

### Alignment of Relevant Polypeptide Sequences

[0886] AlignX from the Vector NTI (Invitrogen) is based on the popular Clustal algorithm of progressive alignment (Thompson et al. (1997) Nucleic Acids Res 25:4876-4882; Chema et al. (2003). Nucleic Acids Res 31:3497-3500). A phylogenetic tree can be constructed using a neighbour-joining clustering algorithm. Default values are for the gap open penalty of 10, for the gap extension penalty of 0.1 and the selected weight matrix is Blosum 62 (if polypeptides are aligned).

[0887] The result of the multiple sequence alignment using polypeptides relevant in identifying the ones useful in performing the methods of the invention is shown in FIG. 25. The leucine rich repeat and the conserved motifs can be easily discriminated in the various sequences.

### Example 40

### Calculation of Global Percentage Identity Between Polypeptide Sequences Useful in Performing the Methods of the Invention

[0888] Global percentages of similarity and identity between full length polypeptide sequences useful in performing the methods of the invention were determined using one of the methods available in the art, the MatGAT (Matrix Global Alignment Tool) software (BMC Bioinformatics. 2003 4:29. MatGAT: an application that generates similarity/identity matrices using protein or DNA sequences. Campanella J J, Bitincka L, Smalley J; software hosted by Ledion Bitincka). MatGAT software generates similarity/identity matrices for DNA or protein sequences without needing pre-alignment of the data. The program performs a series of pair-wise alignments using the Myers and Miller global alignment algorithm (with a gap opening penalty of 12, and a gap extension penalty of 2), calculates similarity and identity using for example Blosum 62 (for polypeptides), and then places the results in a distance matrix. Sequence similarity is shown in the bottom half of the dividing line and sequence identity is shown in the top half of the diagonal dividing line.

Parameters used in the comparison were:
[0889] Scoring matrix: Blosum62
[0890] First Gap: 12
[0891] Extending gap: 2

[0892] Results of the software analysis are shown in Table JJ for the global similarity and identity over the full length of the polypeptide sequences (excluding the partial polypeptide sequences). Percentage identity is given above the diagonal and percentage similarity is given below the diagonal.

[0893] The percentage identity between the polypeptide sequences useful in performing the methods of the invention can be as low as 27% amino acid identity compared to SEQ ID NO: 252.

TABLE JJ
MatGAT results for global similarity and identity over the full length of the polypeptide sequences.

| | 1 | 2 | 3 | 4 | 5 | 6 | 7 | 8 | 9 | 10 | 11 | 12 | 13 | 14 | 15 | 16 | 17 |
|---|---|---|---|---|---|---|---|---|---|---|---|---|---|---|---|---|---|
| 1. SEQID2 | | 29.8 | 46.8 | 55.2 | 67.0 | 66.1 | 66.7 | 71.4 | 63.6 | 36.8 | 34.6 | 35.5 | 39.7 | 39.0 | 41.0 | 27.6 | 32.1 |
| 2. SEQID12 | 40.4 | | 29.8 | 23.0 | 26.8 | 28.1 | 23.6 | 25.3 | 28.7 | 30.3 | 28.1 | 30.9 | 32.0 | 28.1 | 24.7 | 16.3 | 17.4 |
| 3. SEQID13 | 57.9 | 39.3 | | 42.9 | 46.0 | 47.6 | 44.4 | 47.6 | 45.2 | 31.9 | 33.3 | 33.1 | 34.1 | 37.3 | 34.1 | 24.8 | 28.3 |
| 4. SEQID14 | 59.0 | 32.0 | 50.8 | | 57.1 | 55.4 | 77.4 | 77.4 | 83.2 | 25.4 | 26.7 | 26.6 | 30.2 | 32.2 | 33.3 | 21.6 | 23.9 |
| 5. SEQID15 | 80.9 | 41.0 | 57.9 | 69.1 | | 89.1 | 63.4 | 67.9 | 66.1 | 36.9 | 31.9 | 33.1 | 40.5 | 37.3 | 40.9 | 24.8 | 27.9 |
| 6. SEQID16 | 79.1 | 38.2 | 59.5 | 65.5 | 95.5 | | 61.6 | 66.1 | 62.5 | 36.4 | 32.6 | 36.0 | 40.5 | 38.8 | 38.2 | 24.0 | 28.8 |
| 7. SEQID17 | 69.5 | 34.8 | 57.1 | 78.1 | 72.7 | 69.1 | | 94.9 | 81.3 | 30.8 | 29.6 | 31.7 | 34.1 | 34.7 | 39.4 | 25.5 | 29.0 |
| 8. SEQID18 | 74.3 | 37.1 | 60.3 | 80.0 | 77.3 | 73.6 | 94.9 | | 85.0 | 33.1 | 31.9 | 33.8 | 36.5 | 37.3 | 42.4 | 28.2 | 32.0 |
| 9. SEQID19 | 69.2 | 39.3 | 56.3 | 86.0 | 78.2 | 74.5 | 84.1 | 88.8 | | 36.9 | 32.6 | 36.7 | 38.1 | 39.8 | 40.2 | 28.8 | 29.6 |
| 10. SEQID20 | 54.6 | 41.6 | 56.9 | 46.2 | 57.7 | 60.8 | 50.0 | 53.1 | 54.6 | | 66.2 | 46.9 | 51.9 | 44.3 | 42.7 | 26.3 | 26.9 |
| 11. SEQID21 | 51.9 | 44.4 | 56.3 | 47.4 | 54.8 | 54.8 | 50.4 | 53.3 | 52.6 | 77.8 | | 49.0 | 46.8 | 41.1 | 39.3 | 28.7 | 27.2 |
| 12. SEQID22 | 54.0 | 43.8 | 54.7 | 45.3 | 53.2 | 54.0 | 49.6 | 51.8 | 54.7 | 65.5 | 65.5 | | 61.9 | 45.1 | 40.3 | 24.0 | 22.9 |
| 13. SEQID23 | 58.7 | 45.5 | 55.6 | 50.0 | 60.3 | 59.5 | 54.8 | 57.1 | 63.5 | 66.9 | 66.7 | 77.7 | | 53.8 | 44.4 | 27.0 | 27.6 |
| 14. SEQID24 | 61.9 | 42.7 | 57.9 | 55.1 | 58.5 | 63.6 | 61.0 | 63.6 | 62.7 | 66.9 | 64.4 | 68.3 | 77.0 | | 73.7 | 27.9 | 29.4 |
| 15. SEQID25 | 62.9 | 35.4 | 50.0 | 53.3 | 60.0 | 58.2 | 66.7 | 69.7 | 61.7 | 56.2 | 54.8 | 54.7 | 60.3 | 73.7 | | 36.7 | 38.6 |
| 16. SEQID34 | 45.7 | 25.3 | 38.1 | 38.1 | 39.1 | 40.0 | 45.5 | 48.5 | 44.9 | 40.0 | 40.7 | 36.0 | 41.3 | 41.5 | 56.3 | | 42.0 |
| 17. SEQID35 | 50.5 | 30.3 | 45.2 | 40.0 | 46.4 | 44.5 | 47.5 | 50.5 | 45.8 | 34.6 | 42.2 | 36.7 | 40.5 | 42.4 | 55.2 | 57.7 | |

### Example 41

### Topology Prediction of the Polypeptide Sequences Useful in Performing the Methods of the Invention (Subcellular Localization, Transmembrane . . . )

[0894] TargetP 1.1 predicts the subcellular location of eukaryotic proteins. The location assignment is based on the predicted presence of any of the N-terminal pre-sequences: chloroplast transit peptide (cTP), mitochondrial targeting peptide (mTP) or secretory pathway signal peptide (SP). Scores on which the final prediction is based are not really probabilities, and they do not necessarily add to one. However, the location with the highest score is the most likely according to TargetP, and the relationship between the scores (the reliability class) may be an indication of how certain the prediction is. The reliability class (RC) ranges from 1 to 5, where 1 indicates the strongest prediction. TargetP is maintained at the server of the Technical University of Denmark.

[0895] For the sequences predicted to contain an N-terminal presequence a potential cleavage site can also be predicted.

[0896] A number of parameters were selected, such as organism group (non-plant or plant), cutoff sets (none, predefined set of cutoffs, or user-specified set of cutoffs), and the calculation of prediction of cleavage sites (yes or no).

[0897] The results of TargetP 1.1 analysis of the polypeptide sequence as represented by SEQ ID NO: 252 are presented Table KK. The “plant” organism group has been selected, no cutoffs defined, and the predicted length of the transit peptide requested. The subcellular localization of the polypeptide sequence as represented by SEQ ID NO: 252 may be the mitochondrion; however it should be noted that the reliability class is 5 (i.e. the lowest reliability class).

TABLE KK
TargetP 1.1 analysis of the polypeptide sequence as represented
by SEQ ID NO: 252

| | |
|---|---|
| Length (AA) | 105 |
| Chloroplastic transit peptide | 0.025 |
| Mitochondrial transit peptide | 0.552 |
| Secretory pathway signal peptide | 0.009 |
| Other subcellular targeting | 0.416 |
| Predicted Location | mitochondrion |
| Reliability class | 5 |

[0898] Two transmembrane domains are identified by the TMHMM program, hosted on the server of the Center for Biological Sequence Analysis, Technical University of Denmark. The probability that the N-terminus is located inside is 0.997. Further details on the orientation are given in Table LL:

TABLE LL
results of TMHMM 2.0

| Orientation | begin - end residue |
|---|---|
| inside | 1 42 |
| TMhelix | 43 65 |
| outside | 66 74 |
| TMhelix | 75 92 |
| inside | 93 105 |

[0899] Many other algorithms can be used to perform such analyses, including:
[0900] ChloroP 1.1 hosted on the server of the Technical University of Denmark;
[0901] Protein Prowler Subcellular Localisation Predictor version 1.2 hosted on the server of the Institute for Molecular Bioscience, University of Queensland, Brisbane, Australia;
[0902] PENCE Proteome Analyst PA-GOSUB 2.5 hosted on the server of the University of Alberta, Edmonton, Alberta, Canada;

### Example 42

### Gene Cloning

[0903] DNA manipulation: unless otherwise stated, recombinant DNA techniques are performed according to standard protocols described in (Sambrook (2001) Molecular Cloning: a laboratory manual, 3rd Edition, Cold Spring Harbor Laboratory Press, CSH, New York) or in Volumes 1 and 2 of Ausubel et al. (1994), Current Protocols in Molecular Biology, Current Protocols. Standard materials and methods for plant molecular work are described in Plant Molecular Biology Labfax (1993) by R. D. D. Croy, published by BIOS Scientific Publications Ltd (UK) and Blackwell Scientific Publications (UK).

[0904] The Oryza sativa SYR gene was amplified by PCR using as template an Oryza sativa seedling cDNA library (Invitrogen, Paisley, UK). After reverse transcription of RNA extracted from seedlings, the cDNAs were cloned into pCMV Sport 6.0. Average insert size of the bank was 1.5 kb and the original number of clones was of the order of 1.59×10⁷ cfu. Original titer was determined to be 9.6×10⁵ cfu/ml after first amplification of 6×10¹¹ cfu/ml. After plasmid extraction, 200 ng of template was used in a 50 μl PCR mix. Primers prm08170 (SEQ ID NO: 253; sense, start codon in bold, AttB1 site in italic:

5′-ggggacaagtttgtacaaaaaagcaggcttaaacaatggaaggtgta
ggtgctagg-3′)

and prm08171 (SEQ ID NO: 254; reverse, complementary, AttB2 site in italic:

5′-ggggaccactttgtacaagaaagctgggtcaaaaacaaaaataaatt
cccc-3′),

which include the AttB sites for Gateway recombination, were used for PCR amplification. PCR was performed using Hifi Taq DNA polymerase in standard conditions. A PCR fragment of the correct size was amplified and purified also using standard methods. The first step of the Gateway procedure, the BP reaction, was then performed, during which the PCR fragment recombines in vivo with the pDONR201 plasmid to produce, according to the Gateway terminology, an “entry clone”, pSYR. Plasmid pDONR201 was purchased from Invitrogen, as part of the Gateway® technology.

### Example 43

### Vector Construction

[0905] The entry clone pSYR was subsequently used in an LR reaction with a destination vector used for Oryza sativa transformation. This vector contains as functional elements within the T-DNA borders: a plant selectable marker; a screenable marker expression cassette; and a Gateway cassette intended for LR in vivo recombination with the sequence of interest already cloned in the entry clone. A rice GOS2 promoter (SEQ ID NO: 58) for constitutive expression was located upstream of this Gateway cassette. A similar vector construct was prepared, but with the high mobility group protein promoter (HMGP, SEQ ID NO: 283 or SEQ ID NO: 293) instead of the GOS promoter

[0906] After the LR recombination step, the resulting expression vectors, pGOS2::SYR (with the GOS2 promoter) and pHMGP::SYR (with the HMGP promoter), both for constitutive SYR expression (FIG. 25) were transformed into Agrobacterium strain LBA4044 and subsequently to Oryza sativa plants.

### Example 44

### Evaluation Methods of Plants Transformed with SYR Under the Control of the Rice GOS2 Promoter or the HMGP Promoter

### 44.1 Evaluation Set-Up

[0907] Approximately 15 to 20 independent T0 rice transformants were generated. The primary transformants were transferred from a tissue culture chamber to a greenhouse for growing and harvest of T1 seed. Eight events, of which the T1 progeny segregated 3:1 for presence/absence of the transgene, were retained. For each of these events, approximately 10 T1 seedlings containing the transgene (hetero- and homo-zygotes) and approximately 10 T1 seedlings lacking the transgene (nullizygotes) were selected by monitoring visual marker expression. The selected T1 plants were transferred to a greenhouse. Each plant received a unique barcode label to link unambiguously the phenotyping data to the corresponding plant. The selected T1 plants were grown on soil in 10 cm diameter pots under the following environmental settings: photoperiod=11.5 h, daylight intensity=30,000 lux or more, daytime temperature=28° C. or higher, night time temperature=22° C., relative humidity=60-70%. Transgenic plants and the corresponding nullizygotes were grown side-by-side at random positions. From the stage of sowing until the stage of maturity the plants were passed several times through a digital imaging cabinet. At each time point digital images (2048×1536 pixels, 16 million colours) were taken of each plant from at least 6 different angles.

### Nitrogen Use Efficiency Screen

[0908] Rice plants from T2 seeds were grown in potting soil under normal conditions except for the nutrient solution. The pots were watered from transplantation to maturation with a specific 15 nutrient solution containing reduced N nitrogen (N) content, usually between 7 to 8 times less. The rest of the cultivation (plant maturation, seed harvest) was the same as for plants not grown under abiotic stress. Growth and yield parameters are recorded as detailed for growth under normal conditions.

### 44.2 Statistical Analysis: F Test

[0909] A two factor ANOVA (analysis of variants) was used as a statistical model for the overall evaluation of plant phenotypic characteristics. An F test was carried out on all the parameters measured of all the plants of all the events transformed with the gene of the present invention. The F test was carried out to check for an effect of the gene over all the transformation events and to verify for an overall effect of the gene, also known as a global gene effect. The threshold for significance for a true global gene effect was set at a 5% probability level for the F test. A significant F test value points to a gene effect, meaning that it is not only the mere presence or position of the gene that is causing the differences in phenotype.

[0910] Because two experiments with overlapping events were carried out, a combined analysis was performed. This is useful to check consistency of the effects over the two experiments, and if this is the case, to accumulate evidence from both experiments in order to increase confidence in the conclusion. The method used was a mixed-model approach that takes into account the multilevel structure of the data (i.e. experiment-event-segregants). P values were obtained by comparing likelihood ratio test to chi square distributions.

### 44.3 Parameters Measured

### Biomass-Related Parameter Measurement

[0911] The plant aboveground area (or leafy biomass) was determined by counting the total number of pixels on the digital images from aboveground plant parts discriminated from the background. This value was averaged for the pictures taken on the same time point from the different angles and was converted to a physical surface value expressed in square mm by calibration. Experiments show that the aboveground plant area measured this way correlates with the biomass of plant parts above ground. The above ground area is the area measured at the time point at which the plant had reached its maximal leafy biomass. Increase in root biomass is expressed as an increase in total root biomass (measured as maximum biomass of roots observed during the lifespan of a plant).

### Seed-Related Parameter Measurements

[0912] The mature primary panicles were harvested, counted, bagged, barcode-labelled and then dried for three days in an oven at 37° C. The panicles were then threshed and all the seeds were collected and counted. The filled husks were separated from the empty ones using an air-blowing device. The empty husks were discarded and the remaining fraction was counted again. The filled husks were weighed on an analytical balance. The number of filled seeds was determined by counting the number of filled husks that remained after the separation step. The total seed yield was measured by weighing all filled husks harvested from a plant. Thousand Kernel Weight (TKW) is extrapolated from the number of filled seeds counted and their total weight.

### Example 45

### Measurement of Yield-Related Parameters for pGOS2::SYR Transformants Grown Under Conditions of Nutrient Deficiency

[0913] Upon analysis of the seeds as described above, the inventors found that plants transformed with the pGOS2::SYR gene construct and grown under nutrient deficiency stress, had a higher seed yield, expressed as number of filled seeds (increase of more than 5%), total weight of seeds (increase of more than 5%) and TKW (increase of more than 2.5%), compared to plants lacking the SYR transgene. There was also observed an increase in shoot biomass (more than 5%) and root biomass (several lines more than 5%).

The application's sequence listing, which the Patent Office published only in electronic form, follows.

SEQUENCE LISTING (293 sequences)

SEQ ID NO: 1 - DNA, 1397 bp, Arabidopsis thaliana
atggaaaacaaaagccatagcaaccaccaccggtaccatcatctatcatcccggagccacgagcaaaaccagcgtggcctaatttcgataaatgccataatcatcattggcatctccattatctccatattcataatccttgcaattctcctaataatcattttacttcatcgacttaaatccgcaagagtcaaagcacaagaattatcttgcaaagaaagcttcaacaacatgaacaatggtggagcttccaccaactacagctacacttctagccctgatgacatcaagagagattgtctatactcaagaaacccaacatcgttcagacaattacccccacagacaaaaagttgtaggagaagccgagccgaaggagtagaagtgtacacatacaaggaattagagattgcaacaaataatttcagcgaggagaagaaaatcggaaatggagatgtgtacaaaggagtactaagtgatggaactgttgcggccattaaaaagcttcatatgtttaatgataatgctagtaaccaaaagcatgaagaacggtcctttaggcttgaggttgatcttcttagtcgattacaatgcccatatttggtggaattacttggatattgtgcagatcaaaaccataggatcytgatatatgaatttatgcctaatggtactgtggaacatcatctccacgatcataattttaagaatctaaaggatcgacctcaaccattagattggggagctcggcttaggatcgcccttgattgcgccagagccctaragtttcttcatgagaatacaatctctactgttatccaccggaacttcaagtgtaccaacattttgttggatcaaaataatcgagctaaagtttcagatttcggattagccaaaaccggatccgataaactaaacggtgagatttcaacaagggttattggcaccacaggatatcttgctccagagtatgcctctactggaaagcttactacaaaatcagatgtttatagttatggtattgtgttactacaactcttaacgggtcgcacaccgatcgattcaagacgtccacggggacaagatgtccttgtctcttgggctcttccaagactaaccaatagagagaaaattagtgaaatggtggatccaaccatgaaaggtcaatactcacaaaaagatcttattcaggtagcagccatagcagcagtgtgtgtgcaaccagaagcaagttatagaccgttgatgacggatgttgttcactcgctcattccccttgttaaagctttcaacaaaagtactgattcttctcggtttcctagccgtagagaaagcttgtcatttgatgatattatgccatgacactcttttgtttacccagctttcttgtacaaagt

SEQ ID NO: 2 - protein, 453 aa, Arabidopsis thaliana
  UNSURE (216)..(216): Xaa can be any naturally occurring amino acid
  UNSURE (262)..(262): Xaa can be any naturally occurring amino acid
MENKSHSNHHRYHHLSSRSHEQNQRGLISINAIIIIGISIISIFIILAILLIIILLHRLKSARVKAQELSCKESFNNMNNGGASTNYSYTSSPDDIKRDCLYSRNPTSFRQLPPQTKSCRRSRAEGVEVYTYKELEIATNNFSEEKKIGNGDVYKGVLSDGTVAAIKKLHMFNDNASNQKHEERSFRLEVDLLSRLQCPYLVELLGYCADQNHRIXIYEFMPNGTVEHHLHDHNFKNLKDRPQPLDWGARLRIALDCARALXFLHENTISTVIHRNFKCTNILLDQNNRAKVSDFGLAKTGSDKLNGEISTRVIGTTGYLAPEYASTGKLTTKSDVYSYGIVLLQLLTGRTPIDSRRPRGQDVLVSWALPRLTNREKISEMVDPTMKGQYSQKDLIQVAAIAAVCVQPEASYRPLMTDVVHSLIPLVKAFNKSTDSSRFPSRRESLSFDDIMP

SEQ ID NO: 3 - DNA, 55 bp, Artificial sequence
  primer: prm2500
ggggacaagtttgtacaaaaaagcaggcttcacaatggaaaacaaaagccatagc

SEQ ID NO: 4 - DNA, 50 bp, Artificial sequence
  primer: prm2501
ggggaccactttgtacaagaaagctgggtaaacaaaagagtgtcatggca

SEQ ID NO: 5 - DNA, 2193 bp, Oryza sativa
aatccgaaaagtttctgcaccgttttcaccccctaactaacaatatagggaacgtgtgctaaatataaaatgagaccttatatatgtagcgctgataactagaactatgcaagaaaaactcatccacctactttagtggcaatcgggctaaataaaaaagagtcgctacactagtttcgttttccttagtaattaagtgggaaaatgaaatcattattgcttagaatatacgttcacatctctgtcatgaagttaaattattcgaggtagccataattgtcatcaaactcttcttgaataaaaaaatctttctagctgaactcaatgggtaaagagagagattttttttaaaaaaatagaatgaagatattctgaacgtattggcaaagatttaaacatataattatataattttatagtttgtgcattcgtcatatcgcacatcattaaggacatgtcttactccatcccaatttttatttagtaattaaagacaattgacttatttttattatttatcttttttcgattagatgcaaggtacttacgcacacactttgtgctcatgtgcatgtgtgagtgcacctcctcaatacacgttcaactagcaacacatctctaatatcactcgcctatttaatacatttaggtagcaatatctgaattcaagcactccaccatcaccagaccacttttaataatatctaaaatacaaaaaataattttacagaatagcatgaaaagtatgaaacgaactatttaggtttttcacatacaaaaaaaaaaagaattttgctcgtgcgcgagcgccaatctcccatattgggcacacaggcaacaacagagtggctgcccacagaacaacccacaaaaaacgatgatctaacggaggacagcaagtccgcaacaaccttttaacagcaggctttgcggccaggagagaggaggagaggcaaagaaaaccaagcatcctcctcctcccatctataaattcctccccccttttcccctctctatataggaggcatccaagccaagaagagggagagcaccaaggacacgcgactagcagaagccgagcgaccgccttcttcgatccatatcttccggtcgagttcttggtcgatctcttccctcctccacctcctcctcacagggtatgtgcccttcggttgttcttggatttattgttctaggttgtgtagtacgggcgttgatgttaggaaaggggatctgtatctgtgatgattcctgttcttggatttgggatagaggggttcttgatgttgcatgttatcggttcggtttgattagtagtatggttttcaatcgtctggagagctctatggaaatgaaatggtttagggtacggaatcttgcgattttgtgagtaccttttgtttgaggtaaaatcagagcaccggtgattttgcttggtgtaataaaagtacggttgtttggtcctcgattctggtagtgatgcttctcgatttgacgaagctatcctttgtttattccctattgaacaaaaataatccaactttgaagacggtcccgttgatgagattgaatgattgattcttaagcctgtccaaaatttcgcagctggcttgtttagatacagtagtccccatcacgaaattcatggaaacagttataatcctcaggaacaggggattccctgttcttccgatttgctttagtcccagaattttttttcccaaatatcttaaaaagtcactttctggttcagttcaatgaattgattgctacaaataatgcttttatagcgttatcctagctgtagttcagttaataggtaatacccctatagtttagtcaggagaagaacttatccgatttctgatctccatttttaattatatgaaatgaactgtagcataagcagtattcatttggattattttttttattagctctcaccccttcattattctgagctgaaagtctggcatgaactgtcctcaattttgttttcaaattcacatcgattatctatgcattatcctcttgtatctacctgtagaagtttctttttggttattccttgactgcttgattacagaaagaaatttatgaagctgtaatcgggatagttatactgcttgttcttatgattcatttcctttgtgcagttcttggtgtagcttgccactttcaccagcaaagttc

SEQ ID NO: 6 - protein, 15 aa, Artificial sequence
  motif 1
  VARIANT (1)..(1): /replace = "Leu"
  VARIANT (3)..(3): /replace = "Gly" /replace = "Arg"
  VARIANT (5)..(5): /replace = "Met"
  VARIANT (6)..(6): /replace = "Arg" /replace = "Gln"
  VARIANT (7)..(7): /replace = "Ser" /replace = "Cys"
  VARIANT (8)..(8): /replace = "Pro"
  VARIANT (9)..(9): /replace = "Tyr"
  VARIANT (11)..(11): /replace = "Val"
  UNSURE (12)..(12): Xaa can be any naturally occurring amino acid, preferably one of Lys, Asn, Ala, Ser, Gly or Glu
  VARIANT (14)..(14): /replace = "Leu" /replace = "Val"
MLSRLHHRNLLXLIG

SEQ ID NO: 7 - protein, 11 aa, Artificial sequence
  motif 2
  VARIANT (2)..(2): /replace = "Tyr" /replace = "Asn"
  VARIANT (3)..(3): /replace = "Phe"
  UNSURE (4)..(4): Xaa can be any naturally occurring amino acid, preferably one of Asp, Asn, Glu, Lys, Pro, Gln or Gly
  VARIANT (5)..(5): /replace = "Val" /replace = "Thr"
  VARIANT (7)..(7): /replace = "Met"
  VARIANT (8)..(8): /replace = "Arg" /replace = "Gly"
  VARIANT (11)..(11): /replace = "Val"
LYWXARLLIAL

SEQ ID NO: 8 - protein, 9 aa, Artificial sequence
  motif 3
  VARIANT (2)..(2): /replace = "Lys"
  VARIANT (3)..(3): /replace = "Gly"
  VARIANT (5)..(5): /replace = "Glu"
  VARIANT (6)..(6): /replace = "Phe"
ARALAYLHE

SEQ ID NO: 9 - protein, 14 aa, Artificial sequence
  motif 4
  VARIANT (1)..(1): /replace = "Ile"
  VARIANT (5)..(5): /replace = "Asn"
  VARIANT (6)..(6): /replace = "Leu"
  VARIANT (6)..(6): amino acid is preferably not Ile, Val or Met
  VARIANT (8)..(8): /replace = "Ala" /replace = "Gly" /replace = "Cys"
  VARIANT (9)..(9): /replace = "Thr"
  VARIANT (11)..(11): /replace = "Val"
  VARIANT (14)..(14): /replace = "Asp"
VIHRDFKSSNILLE

SEQ ID NO: 10 - protein, 7 aa, Artificial sequence
  motif 5
  VARIANT (1)..(1): /replace = "Arg"
  VARIANT (3)..(3): /replace = "Ala" /replace = "Thr"
  VARIANT (7)..(7): /replace = "Met" /replace = "Ser"
KVSDFGL

SEQ ID NO: 11 - DNA, 1524 bp, Arabidopsis thaliana
atggaaaacaaaagccatagcaaccaccaccggtaccatcatctatcatcccggagccacgagcaaaaccagcgtggcctaatttcgataaatgccataatcatcattggcatctccattatctccatattcataatccttgcaattctcctaataatcattttacttcatcgacttaaatccgcaagagtcaaagcacaagaattatcttgcaaagaaagcttcaacaacatgaacaatggtggagcttccaccaactacagctacacttctagccctggtaaaacacctaaacattcattccataattttgtaaagaatcataagtttttaattcaaaatcaatcagcaatgagtggagattctcatatctttatatcagtattgaattacttccacatccaatgtgtatttcttattcgaactttaatgttcttgttagatgacatcaagagagattgtctatactcaagaaacccaacatcgttcagacaattacccccacagacaaaaagttgtaggagaagccgagccgaaggagtagaagtgtacacatacaaggaattagagattgcaacaaataatttcagcgaggagaagaaaatcggaaatggagatgtgtacaaaggagtactaagtgatggaactgttgcggccattaaaaagcttcatatgtttaatgataatgctagtaaccaaaagcatgaagaacggtcctttaggcttgaggttgatcttcttagtcgattacaatgcccatatttggtggaattacttggatattgtgcagatcaaaaccataggatcctgatatatgaatttatgcctaatggtactgtggaacatcatctccacgatcataattttaagaatctaaaggatcgacctcaaccattagattggggagctcggcttaggatcgcccttgattgcgccagagccctagagtttcttcatgagaatacaatctctactgttatccaccggaacttcaagtgtaccaacattttgttggatcaaaataatcgagctaaagtttcagatttcggattagccaaaaccggatccgataaactaaacggtgagatttcaacaagggttattggcaccacaggatatcttgctccagagtatgcctctactggaaagcttactacaaaatcagatgtttatagttatggtattgtgttactacaactcttaacgggtcgcacaccgatcgattcaagacgtccacggggacaagatgtccttgtctcttgggctcttccaagactaaccaatagagagaaaattagtgaaatggtggatccaaccatgaaaggtcaatactcacaaaaagatcttattcaggtagcagccatagcagcagtgtgtgtgcaaccagaagcaagttatagaccgttgatgacggatgttgttcactcgctcattccccttgttaaagctttcaacaaaagtactgattcttctcggtttcctagccgtagagaaagcttgtcatttgatgatattatgccatga

SEQ ID NO: 12 - protein, 507 aa, Arabidopsis thaliana
MENKSHSNHHRYHHLSSRSHEQNQRGLISINAIIIIGISIISIFIILAILLIIILLHRLKSARVKAQELSCKESFNNMNNGGASTNYSYTSSPGKTPKHSFHNFVKNHKFLIQNQSAMSGDSHIFISVLNYFHIQCVFLIRTLMFLLDDIKRDCLYSRNPTSFRQLPPQTKSCRRSRAEGVEVYTYKELEIATNNFSEEKKIGNGDVYKGVLSDGTVAAIKKLHMFNDNASNQKHEERSFRLEVDLLSRLQCPYLVELLGYCADQNHRILIYEFMPNGTVEHHLHDHNFKNLKDRPQPLDWGARLRIALDCARALEFLHENTISTVIHRNFKCTNILLDQNNRAKVSDFGLAKTGSDKLNGEISTRVIGTTGYLAPEYASTGKLTTKSDVYSYGIVLLQLLTGRTPIDSRRPRGQDVLVSWALPRLTNREKISEMVDPTMKGQYSQKDLIQVAAIAAVCVQPEASYRPLMTDVVHSLIPLVKAFNKSTDSSRFPSRRESLSFDDIMP

SEQ ID NO: 13 - DNA, 1482 bp, Arabidopsis thaliana
caaaaatgaacaacaccaaaatggaaaacaaaagccatagcaaccaccaccggtaccatcatctatcatcccggagccacgagcaaaaccagcgtggcctaatttcgataaatgccataatcatcattggcatctccattatctccatattcataatccttgcaattctcctaataatcattttacttcatcgacttaaatccgcaagagtcaaagcacaagaattatcttgcaaagaaagcttcaacaacatgaacaatggtggagcttccaccaactacagctacacttctagccctgatgacatcaagagagattgtctatactcaagaaacccaacatcgttcagacaattacccccacagacaaaaagttgtaggagaagccgagccgaaggagtagaagtgtacacatacaaggaattagagattgcaacaaataatttcagcgaggagaagaaaatcggaaatggagatgtgtacaaaggagtactaagtgatggaactgttgcggccattaaaaagcttcatatgtttaatgataatgctagtaaccaaaagcatgaagaacggtcctttaggcttgaggttgatcttcttagtcgattacaatgcccatatttggtggaattacttggatattgtgcagatcaaaaccataggatcctgatatatgaatttatgcctaatggtactgtggaacatcatctccacgatcataattttaagaatctaaaggatcgacctcaaccattagattggggagctcggcttaggatcgcccttgattgcgccagagccctagagtttcttcatgagaatacaatctctactgttatccaccggaacttcaagtgtaccaacattttgttggatcaaaataatcgagctaaagtttcagatttcggattagccaaaaccggatccgataaactaaacggtgagatttcaacaagggttattggcaccacaggatatcttgctccagagtatgcctctactggaaagcttactacaaaatcagatgtttatagttatggtattgtgttactacaactcttaacgggtcgcacaccgatcgattcaagacgtccacggggacaagatgtccttgtctcttgggctcttccaagactaaccaatagagagaaaattagtgaaatggtggatccaaccatgaaaggtcaatactcacaaaaagatcttattcaggtagcagccatagcagcagtgtgtgtgcaaccagaagcaagttatagaccgttgatgacggatgttgttcactcgctcattccccttgttaaagctttcaacaaaagtactgattcttctcggtttcctagccgtagagaaagcttgtcatttgatgatattatgccatgacactcttttgtttaatatgtattaatttctctcttttaagttgagattctcgttgttattgtatatttgtataggtaaatgaatccatttatcttgtact

SEQ ID NO: 14 - protein, 458 aa, Arabidopsis thaliana
MNNTKMENKSHSNHHRYHHLSSRSHEQNQRGLISINAIIIIGISIISIFIILAILLIIILLHRLKSARVKAQELSCKESFNNMNNGGASTNYSYTSSPDDIKRDCLYSRNPTSFRQLPPQTKSCRRSRAEGVEVYTYKELEIATNNFSEEKKIGNGDVYKGVLSDGTVAAIKKLHMFNDNASNQKHEERSFRLEVDLLSRLQCPYLVELLGYCADQNHRILIYEFMPNGTVEHHLHDHNFKNLKDRPQPLDWGARLRIALDCARALEFLHENTISTVIHRNFKCTNILLDQNNRAKVSDFGLAKTGSDKLNGEISTRVIGTTGYLAPEYASTGKLTTKSDVYSYGIVLLQLLTGRTPIDSRRPRGQDVLVSWALPRLTNREKISEMVDPTMKGQYSQKDLIQVAAIAAVCVQPEASYRPLMTDVVHSLIPLVKAFNKSTDSSRFPSRRESLSFDDIMP

SEQ ID NO: 15 - DNA, 1516 bp, Arabidopsis thaliana
caaaaaccaaaaactaattttcacgaaatccgaagcttaaaaattattcctctactgtttcaatttcatctcttcttcctcttgagttggcaatttctagggttttctcattttcctttttttccatttctggaaactggtaaaaggctttttctttgtctgtgggggagaaacaaaaatggagacagacgaagcataccaaaagaaagagcgagctgcattagtagccatcgttgtccttgcttgtcttgctttatcttctttgttcgtcgcctttagctactactgctatattcgtaacaaggtttctaagcgtcacagaattagcaagaggtttgattgtgaggaaaaaggcgattgtcagaaagtacaagatgttactgaaaatgggttgcaaattttcacctttaagcaattgcattcagcaactggtggatttagcaagtctaatgtggttgggaatggtgggtttggcttggtttatcgtggtgtgcttaacgatggcagaaaagttgctatcaagctcatggatcatgcaggaaagcaaggggaagaagaattcaagatggaggttgagttactgagccgtctgcgttcaccatacttgttggcacttcttggttattgctcagacaatagtcataagctgcttgtgtatgagttcatggcaaatggtggtctgcaggaacacctgtatcttcccaacaggtctggttctgtcccaccaagattagattgggaaactaggatgagaatagctgtggaagctgcaaaaggcttggaatatctccatgaacaagtatcacccccggtgattcatagagactttaagagcagcaatattctgctggacagaaacttcaatgccaaagtttcagattttggattggctaaagtcggatcagataaagctggtggacacgtttctacccgtgtattaggcacacaaggatatgtagctcctgagtacgctttaactggtcacttgacaacaaagtcggatgtctatagctacggtgttgtcctgttagagttactaaccggtagagttccagtagatatgaagagagctacaggagaaggtgttcttgtctcttgggctttgcctcaattggctgatagagacaaagtagtagacataatggatccaacactcgaaggacaatactctacgaaagaagttgttcaagttgcagcaatagcagcaatgtgtgttcaagcagaagctgactacagacccttaatggcagatgtggtgcagtcactggttccattagtgagaaaccgtaggtcagcttcaaagcttagtggctgctctagtagctttagcttggctcggtctcctaactctccgggtaaagcaagcataggttctcaatgaataaatcaatcagagaagacgaaatgtgaggcttttattatgtaacggtatttactaaaacagacaatgatgtaaacacttgagtgatcaaacatggagtcatagagataatcatcaaataaactttttcgaatc

SEQ ID NO: 16 - protein, 400 aa, Arabidopsis thaliana
METDEAYQKKERAALVAIVVLACLALSSLFVAFSYYCYIRNKVSKRHRISKRFDCEEKGDCQKVQDVTENGLQIFTFKQLHSATGGFSKSNVVGNGGFGLVYRGVLNDGRKVAIKLMDHAGKQGEEEFKMEVELLSRLRSPYLLALLGYCSDNSHKLLVYEFMANGGLQEHLYLPNRSGSVPPRLDWETRMRIAVEAAKGLEYLHEQVSPPVIHRDFKSSNILLDRNFNAKVSDFGLAKVGSDKAGGHVSTRVLGTQGYVAPEYALTGHLTTKSDVYSYGVVLLELLTGRVPVDMKRATGEGVLVSWALPQLADRDKVVDIMDPTLEGQYSTKEVVQVAAIAAMCVQAEADYRPLMADVVQSLVPLVRNRRSASKLSGCSSSFSLARSPNSPGKASIGSQ

SEQ ID NO: 17 - DNA, 1161 bp, Arabidopsis thaliana
atggagacagacgaagcataccaaaagaaagagcgagctgcattagtagccatcgttgtccttgcttgtcttgctttatcttctttgttcgtcgcctttagctactactgctatattcgtaacaaggaaaaaggcgattgtcagaaagtacaagatgttactgaaaatgggttgcaaattttcacctttaagcaattgcattcagcaactggtggatttagcaagtctaatgtggttgggaatggtgggtttggcttggtttatcgtggtgtgcttaacgatggcagaaaagttgctatcaagctcatggatcatgcaggaaagcaaggggaagaagaattcaagatggaggttgagttactgagccgtctgcgttcaccatacttgttggcacttcttggttattgctcagacaatagtcataagctgcttgtgtatgagttcatggcaaatggtggtctgcaggaacacctgtatcttcccaacaggtctggttctgtcccaccaagattagattgggaaactaggatgagaatagctgtggaagctgcaaaaggcttggaatatctccatgaacaagtatcacccccggtgattcatagagactttaagagcagcaatattctgctggacagaaacttcaatgccaaagtttcagattttggattggctaaagtcggatcagataaagctggtggacacgtttctacccgtgtattaggcacacaaggatatgtagctcctgagtacgctttaactggtcacttgacaacaaagtcggatgtctatagctacggtgttgtcctgttagagttactaaccggtagagttccagtagatatgaagagagctacaggagaaggtgttcttgtctcttgggctttgcctcaattggctgatagagacaaagtagtagacataatggatccaacactcgaaggacaatactctacgaaagaagttgttcaagttgcagcaatagcagcaatgtgtgttcaagcagaagctgactacagacccttaatggcagatgtggtgcagtcactggttccattagtgagaaaccgtaggtcagcttcaaagcttagtggctgctctagtagctttagcttggctcggtctcctaactctccgggtaaagcaagcataggttctcaatga

SEQ ID NO: 18 - protein, 386 aa, Arabidopsis thaliana
METDEAYQKKERAALVAIVVLACLALSSLFVAFSYYCYIRNKEKGDCQKVQDVTENGLQIFTFKQLHSATGGFSKSNVVGNGGFGLVYRGVLNDGRKVAIKLMDHAGKQGEEEFKMEVELLSRLRSPYLLALLGYCSDNSHKLLVYEFMANGGLQEHLYLPNRSGSVPPRLDWETRMRIAVEAAKGLEYLHEQVSPPVIHRDFKSSNILLDRNFNAKVSDFGLAKVGSDKAGGHVSTRVLGTQGYVAPEYALTGHLTTKSDVYSYGVVLLELLTGRVPVDMKRATGEGVLVSWALPQLADRDKVVDIMDPTLEGQYSTKEVVQVAAIAAMCVQAEADYRPLMADVVQSLVPLVRNRRSASKLSGCSSSFSLARSPNSPGKASIGSQ

SEQ ID NO: 19 - DNA, 2627 bp, Arabidopsis thaliana
aacggaatattttttttctgggagctgaaaatcgttggtgacgatggcggattctctttctagggtttacggaactctgtttagtggtgttaatatatctctcttctcggatccaccgttgaaaaccccctgaagagtgtttttttttccgggtttaaggtcttttacgtttcgttttttcttgagatttcgtcttccgctgtgagtttctgttctcgcggcgagtttttgtgtagatctgagggttttcaaggcaagagaaagtgtcggtgatgtcgattttctcactcgcgagctcttctgattcacaaagagatgacctaataatggcgttgaaggcggtggttattgtatattgtgtggtttctctcgtcagtgttcaattagctgatgctcaacatgaaggactgccagtttcaccaacgttatcaccttcaacttcaccagttatcactgatctgcccctaccagctgaatttccgcggtttcacagaaagtatttcgcaccacaacaagcagaagcacctcagcattctcccccttatagtcgtttggtcgcttctgatcatccccctaccagctcacatttctccaaaccttccatgaaaaggaatgctcagtctcctggagccggcttggctgatattgctccagcacaatctagcaatggtgttcttcctgatgccttaactcagccacctttgtcgccctccatttcaaattgttgcaaatcagatatggtgcttaaacgaagaagtattggttgccactgcgtgtatcctataaaactggacatccttctcttgaatgtttcagaaactcctagttggaacatgttcttgaacgaatttgctacccagcttggtctcctacctcaccaaatcgagctgattaacttctatgtgctaagcttatcaaggatgaacatatcgatggatatcacccctcattctggaattagtttctcagctagtcaggcatccgcaataaactcttcccttatcagccacaagattcaatttagccctactttggtgggagattacaaacttctaaaccttacttggtttgaggcccctgcaccttcgcaagcacctctagtggcttcttcacctcataaagcaccatcacaaggatcctcagcaactacgtcagtaagatctccagggaaaaagaggcatcccaatcttattcttatcttttctatagccgctggtgtgcttatacttgccataatcactgtacttgttatttgttcccgcgcactccgagaagagaaagctccagatcctcacaaagaagctgtaaaaccaaggaacctggacgctggttcatttgggggatctcttcctcacccagcaagtacacggtttctgtcatatgaagaactcaaagaggcaactagcaattttgaatctgctagcattctaggagaaggtgggtttggcaaggtttacagaggcatcttagccgatggtactgctgtagcgattaagaagctcacaagtggtgggccacaaggtgataaagaattccaggtggagattgatatgcttagccgtcttcatcatcgtaatcttgtgaaacttgtgggttactatagtagtcgagattcttctcagcacctactttgttatgagcttgttccaaatggcagcctcgaggcttggctccatgggcctctcgggttgaactgtcctcttgattgggacaccagaatgaagattgcacttgatgctgcaagaggacttgcataccttcatgaagactcgcaaccctccgttatacacagagattttaaagcctctaatatactccttgaaaacaacttcaacgccaaagttgcagattttggcctagccaaacaagctcctgaaggcaggggtaatcacttatctactcgtgttatgggcacatttggatatgttgcgcctgaatatgcaatgacgggacacctactcgtcaagagtgatgtttatagttacggtgtggtccttctcgaattgttaactggtagaaaacctgtggatatgtcacaaccttcaggccaagaaaatctcgtcacttggacaaggccagttttaagagacaaagaccggttagaagaactagtcgattcaagacttgaaggaaaatacccgaaagaagatttcataagagtatgcacaatcgctgcagcttgtgttgcacctgaagctagccagagaccaacgatgggcgaagtggttcagtcacttaaaatggttcaacgggtggttgagtatcaagacccggttttaaacacttcaaataaagctcgtcctaaccggagacaatcatcagctacgttcgagtcagaagtaacctcttctatgttctcttctggtccttattctggtctaagcgcttttgatcatgaaaatattacacgaacaactgttttctcagaagatcttcacgaaggccgatgatagaagccagggttttcttctttttatttgtttttctcccacttacggtgagaaaatttccaccagagaagcttttgagtttgggacattattacagctctttggattttggattctcctttattggaggatagaattttgtatatatttttgcgttaattaattaatatttgccac

SEQ ID NO: 20 - protein, 725 aa, Arabidopsis thaliana
MSIFSLASSSDSQRDDLIMALKAVVIVYCVVSLVSVQLADAQHEGLPVSPTLSPSTSPVITDLPLPAEFPRFHRKYFAPQQAEAPQHSPPYSRLVASDHPPTSSHFSKPSMKRNAQSPGAGLADIAPAQSSNGVLPDALTQPPLSPSISNCCKSDMVLKRRSIGCHCVYPIKLDILLLNVSETPSWNMFLNEFATQLGLLPHQIELINFYVLSLSRMNISMDITPHSGISFSASQASAINSSLISHKIQFSPTLVGDYKLLNLTWFEAPAPSQAPLVASSPHKAPSQGSSATTSVRSPGKKRHPNLILIFSIAAGVLILAIITVLVICSRALREEKAPDPHKEAVKPRNLDAGSFGGSLPHPASTRFLSYEELKEATSNFESASILGEGGFGKVYRGILADGTAVAIKKLTSGGPQGDKEFQVEIDMLSRLHHRNLVKLVGYYSSRDSSQHLLCYELVPNGSLEAWLHGPLGLNCPLDWDTRMKIALDAARGLAYLHEDSQPSVIHRDFKASNILLENNFNAKVADFGLAKQAPEGRGNHLSTRVMGTFGYVAPEYAMTGHLLVKSDVYSYGVVLLELLTGRKPVDMSQPSGQENLVTWTRPVLRDKDRLEELVDSRLEGKYPKEDFIRVCTIAAACVAPEASQRPTMGEVVQSLKMVQRVVEYQDPVLNTSNKARPNRRQSSATFESEVTSSMFSSGPYSGLSAFDHENITRTTVFSEDLHEGR

SEQ ID NO: 21 - DNA, 3732 bp, Arabidopsis thaliana
cttcttcttctgccacttcgattgctttaaacttggagattaagattacacatcaaataattcttctttgtcttcctcgtgatcatcgaggaagcttgatctcttctatggaatggagaatttgactctcctccttaggatctgtcttgtttcgtcggttttagttgctgcttcttcctcaggatcggaattgttatctccgttatcatcaccaccgtctccattacccgaaacttcaaaagggtttggtcaagcaccgagtaattcacctgaatctcacaaatccgacaatgtgccaccgtctaaagcttcttctcaaccgtctcttcctcctttagctgatttggcagctccaccaccgtcagattccgtcggaggtaaagcaccggccggtgtgcctgttgtctttgttcctaatgctccagctccagctacaatacccgttaaggatttgcccgtagcttcgcctccggttcttcaacccattacaccgattgcttcaccacctcgattcattccaggagatgcaccaaaggagcctcctttctcaggaagagttactccagccccggtttcatcacctgtttcggatattcctccaattccatcagtggctctgcctccgcctacaccgagcaatgtacctcctagaaatgcttctaacaatcacaagcctcctcctatcgaaaagtctattgctcctgttgcatcaccaccaacaatatcaattgacattgcaccaccagtacatcccgtcatacctaagttaacaccctcgagctcacctgtacctacctcgactccaactaagggatctccgagaagaaatccgccaactacccacccagttttccccatagaatctcctgctgtctcaccagatcatgctgcaaatccagtaaaacatccgccccccagcgataacggagatgatagtaaaagtccgggtgctgcaccggcaaatgaaactgctaaacccttacctgtcttcccacataaagcttctcctccttcgattgctccctcagccccaaaatttaacagacactctcatcatacatctccatctactactccaccgccagattctactcctagtaatgtacaccaccatccttcatcaccatctcctcctcctctatcttcacaccatcaacatcatcaagaacgaaagaaaatcgcagatagtccagctccttcaccactgccaccgcatctcatatctccaaagaagtcaaaccgtaaaggttcaatgactcctcctccacaatcgcaccatgctccttctcctcccattcctgattctttgatttctcctgctcacgctccagtctctttctctatgaaacgcatctccccggctctagcaccttctccaacccaagtgtttcctctcaggtcctcttcaagaccttcaaaatctcggaaattccctctaggtccacctcttcaagcatttcctcctcctccccctaattcagattgttcttcaactatttgtttggaaccgtacacaaacacacctccgggatctccatgtggctgtgtctggccaattcaagttgagctacgccttagcatggcgctctacgacttcttcccaatggtttcagaatttgctcgggaaatcagcgccggagttttcatgaaacagagccaagtccgtataatgggagctaacgcggccagcgaacaacctgagaaatccattgttctaatcgatttagtaccgcttggagataaattcgataacatgactgcaatgctgacttaccagagattctggagtaaaaaagtctatatagatgaaccaatctttggcggatacgacgtgatttacgtgcgttatcctggtttacccgcttccccgccaacttctggtatgaccattatagatcaaggaccgtactctggtaataataacggaagggcggtcaaaccgctcggagttgatgttccaaggaagccgcgcaagaaagagctcaatggtggaagtattgctgtgattgttttatccgcagctgcttttatcggtttatgtttcgttatcgtttggttcttggttttccggcgacaaagagatcgacgacgtctttcgaaaagaacaccacttgctcgcccttcactgccttccctctcgaaaccatcaggctcggcgagatctttaactggaagccgatttagctcaacttcattgtcatttgaatccagcattgctccgtttactctctctgcaaagactttcaccgcaagtgaaataatgaaagctacaaataactttgatgaatcgagggttcttggtgaaggcggatttggacgagtttacgaaggtgttttcgatgacggaactaaagtagcagttaaggtattgaagagagatgaccagcaaggtagcagggagttcttagccgaagtggaaatgcttagtcgtcttcatcacagaaacctcgtgaatttaattggtatttgtatcgaagatcgtaaccgttccctggtttatgaactcataccaaatggcagcgttgaatctcacctccacgggattgataaagcatcttcgcctttagattgggatgctcggttgaagatagctcttggtgcggcccgtggtttagcgtatttacacgaagactcgagcccgcgagttatacacagagacttcaagtccagcaacatcttgctggaaaacgatttcacacctaaagtatctgactttggattggctcgtaacgcccttgatgatgaagataacagacatatatcgacacgcgttatgggaacgtttgggtatgtggcaccggaatacgcaatgacagggcatcttttggtgaagagtgatgtgtatagttacggagttgtgcttctcgagctacttacagggcggaaaccagtggatatgtctcaaccgcccggacaagagaacttagtttcatggactcggccttttcttacgagtgcagaagggcttgcagctattatagatcagtctttaggacccgagatctcattcgatagcatagctaaagtcgcggcaatagcttctatgtgcgttcaaccagaagtatcacaccgtcctttcatgggagaagtagtgcaagctttgaaacttgtcagcaacgaatgtgatgaagctaaagaactcaattctttaacttctatctctaaagacgattttagagatgacactcaagctgagagctcttgtggtgacagctcagcaaggatggctcggtatccattgctaccaaattacgactctgagcctgatacagagagaggattatctacatcggaaatgtacacggggtcagggaggttcgagagacagtctaactcgggtcccttgacctcgggtcgaggcaagagtttctggcaaaagatgaggagattatcgaccggaagcttgagtgagcatggaacaccaacggtcatgttacgatccggttctcgctaaacaatcttttgcctacagaacactgaagagtttttgattgcccgtttaagttaagagactgaaaggaaagaaggtgccttctcctacaagcaaaactctttgcctcatggaaaccggttaagataaaaccaggagtgatcatttcccggttcaaaatttttagttgaatagatctgtttatctgagaagaagaaacaagagattctgttaaatctaatttgaatgtacatatcacgttttaaagtaacaggcttaagcattaagtatcatcatccttc

SEQ ID NO: 22 - protein, 1113 aa, Arabidopsis thaliana
MENLTLLLRICLVSSVLVAASSSGSELLSPLSSPPSPLPETSKGFGQAPSNSPESHKSDNVPPSKASSQPSLPPLADLAAPPPSDSVGGKAPAGVPVVFVPNAPAPATIPVKDLPVASPPVLQPITPIASPPRFIPGDAPKEPPFSGRVTPAPVSSPVSDIPPIPSVALPPPTPSNVPPRNASNNHKPPPIEKSIAPVASPPTISIDIAPPVHPVIPKLTPSSSPVPTSTPTKGSPRRNPPTTHPVFPIESPAVSPDHAANPVKHPPPSDNGDDSKSPGAAPANETAKPLPVFPHKASPPSIAPSAPKFNRHSHHTSPSTTPPPDSTPSNVHHHPSSPSPPPLSSHHQHHQERKKIADSPAPSPLPPHLISPKKSNRKGSMTPPPQSHHAPSPPIPDSLISPAHAPVSFSMKRISPALAPSPTQVFPLRSSSRPSKSRKFPLGPPLQAFPPPPPNSDCSSTICLEPYTNTPPGSPCGCVWPIQVELRLSMALYDFFPMVSEFAREISAGVFMKQSQVRIMGANAASEQPEKSIVLIDLVPLGDKFDNMTAMLTYQRFWSKKVYIDEPIFGGYDVIYVRYPGLPASPPTSGMTIIDQGPYSGNNNGRAVKPLGVDVPRKPRKKELNGGSIAVIVLSAAAFIGLCFVIVWFLVFRRQRDRRRLSKRTPLARPSLPSLSKPSGSARSLTGSRFSSTSLSFESSIAPFTLSAKTFTASEIMKATNNFDESRVLGEGGFGRVYEGVFDDGTKVAVKVLKRDDQQGSREFLAEVEMLSRLHHRNLVNLIGICIEDRNRSLVYELIPNGSVESHLHGIDKASSPLDWDARLKIALGAARGLAYLHEDSSPRVIHRDFKSSNILLENDFTPKVSDFGLARNALDDEDNRHISTRVMGTFGYVAPEYAMTGHLLVKSDVYSYGVVLLELLTGRKPVDMSQPPGQENLVSWTRPFLTSAEGLAAIIDQSLGPEISFDSIAKVAAIASMCVQPEVSHRPFMGEVVQALKLVSNECDEAKELNSLTSISKDDFRDDTQAESSCGDSSARMARYPLLPNYDSEPDTERGLSTSEMYTGSGRFERQSNSGPLTSGRGKSFWQKMRRLSTGSLSEHGTPTVMLRSGSR

SEQ ID NO: 23 - DNA, 3162 bp, Arabidopsis thaliana
ttctggtttcgaattcactttactctcttcgcttccaatctctctctaccactctgataccttcgccggagaagaagctctcgttctctctatcgtcggagaagctctcgttctctgcttccctgctctgtacagatctcgagccgcatttcgtggatctgtcaaaatcgcgttaaaacctactcgcttctctctaaccctagggtttttgaatttttttcgggacgagggagaaatcaatgtctgtgaagctttgaggaagctatatggttacacctttggttctggttagtcttcgttttgatcggcggagagtgttcgccgaggcttggtgtctccgttattgactaatggtggtttttgatttgagataagagatgcggaactttgcgatgcttctgctgttaattcttcttcttcactctctcgcctcgtttcctatatgctttgctcggttatttccgatgagtttgccatttacccgatcaaaggcgcatcaaatgcatttctttcatccttatcttaatccatcagttgctcctacaccttcaccagctttttcccccaacccaagtcgcattccaccactaaggcacaagggtcatcaccgtcatcgtcgctggcatttaagacgcaatgccactgcagtgtcaccttcgtcacatgactgtcagcagacatgtgtggagcctctcacttcaactccctttggttcaccttgtggttgtgtcttccccatgaaagttcagcttctactaagtgtcgcacctttttctattttccccgtgaccaacgagttagaaattgaggttgctgctggaacatacttggaacaaagccaagtgaaaataatgggtgccagtgccgacagtgaaaatcaagggaaaacagtggtggatattaaccttgttccacttggggaaaagttcgacaacactacagcaacacttatttatcagagattccggcacaagaaagtacctctaaatgagactgtttttggtgattatgaggttacgcacataagttatccaggaattccttcttcttcgccaaatggagatgttactggagatgctccaggaggccttccaattccgatcaatgcaacaacttttgccaacaaaagccagggaataggttttagaacgattgcaattattgcgttgtcaggttttgtcctcattctggttttggttggagctatttctataatcgtgaaatggaagaaaattgggaagtcatctaatgctgttggtccggctttggctccatcgattaacaaaaggcctggtgctggatctatgttttccagtagcgccagaagctcaggctcagattctttgatgtcttccatggctacatgtgctttatcagttaagaccttcacactctccgagcttgagaaggctactgatagattcagtgccaagagggttttgggcgagggcggatttggtcgtgtttatcaggggagtatggaagatggaactgaggttgcagtgaaactgctaactagggacaatcagaatcgagaccgtgaatttattgccgaagtcgagatgctaagccgtttgcaccaccgcaatcttgtgaaactgattggaatatgcattgaaggtcgtacacgttgcttgatttatgagctcgtccacaatgggagtgttgagtcccacttacacgaaggaacgcttgattgggatgcgcggttgaagattgcacttggagcagcgagaggactggcttatctccatgaagattcaaatccccgagtaatccaccgtgatttcaaggctagcaatgttctcctagaagatgactttaccccaaaagtctcagactttggactggcaagagaagcaaccgaaggaagtcaacatatttcaactcgagtcatggggacctttgggtacgtggctcctgagtatgcaatgacggggcatctccttgttaaaagcgatgtctatagttatggtgtagttctactagagcttctaaccggtagaagaccagtagacatgtctcaaccttcgggagaggaaaaccttgtgacatgggcgagacccttactagccaacagagagggcctggagcaactggtggaccctgcattggctggaacctacaactttgatgacatggcgaaagtggctgcgattgcctccatgtgcgtccaccaagaggtctcacacagaccattcatgggtgaagttgtgcaggcactaaaacttatatacaacgatgcagatgagacctgtggtgattattgcagccaaaaggactcatcagtaccagactctgctgacttcaaaggcgatctggctccttcggatagcagctggtggaatttgacacctcggttaaggtatggtcaagcttcgtcgttcataacaatggattatagctcaggaccactagaggacatggagaaccggcctcactctgcctctagcattccaagagtaggaggtcttattctaccaaacagatcaggtccgttaagacccatgcgtagtagaagaaacttctttagactgagaggaagcatgagcgaacacggtggaccgtcgtcgtctagacatctctggtccggcaatggtgactggctctgagaaaccagaaaatgtacagtgaagaaaagggaaaaggaggctcacaaactcttgagctgcatggttaggttctggttaatccggccaggttcggttcatctgggtaaagatttccggtttgatttcttttaggagctgtttgttgttatgattatcctcaatagagatttaattgtttgtttttgcgaggatgcaaaagcacagggagggttgtattttgaaggacgcctgtatttagttctctccttttctctctcacccacaaaaaaacatttttatatattttattttagtgaagttagtaattacctaattttttttagtttttcaagttcctaagaaatttggcttttggtcatcgttgttaagtttccggttttctgaatttacatccgaaatattttttggttaaataaaattctggcttgagagtaattggctggtgaatggtaacaagtcacttggtcaaagctgttgtaattcttttctaatttctagtatcttctgtagattggacacaatgacatggattgttgatctttaaagtcgt

SEQ ID NO: 24 - protein, 744 aa, Arabidopsis thaliana
MRNFAMLLLLILLLHSLASFPICFARLFPMSLPFTRSKAHQMHFFHPYLNPSVAPTPSPAFSPNPSRIPPLRHKGHHRHRRWHLRRNATAVSPSSHDCQQTCVEPLTSTPFGSPCGCVFPMKVQLLLSVAPFSIFPVTNELEIEVAAGTYLEQSQVKIMGASADSENQGKTVVDINLVPLGEKFDNTTATLIYQRFRHKKVPLNETVFGDYEVTHISYPGIPSSSPNGDVTGDAPGGLPIPINATTFANKSQGIGFRTIAIIALSGFVLILVLVGAISIIVKWKKIGKSSNAVGPALAPSINKRPGAGSMFSSSARSSGSDSLMSSMATCALSVKTFTLSELEKATDRFSAKRVLGEGGFGRVYQGSMEDGTEVAVKLLTRDNQNRDREFIAEVEMLSRLHHRNLVKLIGICIEGRTRCLIYELVHNGSVESHLHEGTLDWDARLKIALGAARGLAYLHEDSNPRVIHRDFKASNVLLEDDFTPKVSDFGLAREATEGSQHISTRVMGTFGYVAPEYAMTGHLLVKSDVYSYGVVLLELLTGRRPVDMSQPSGEENLVTWARPLLANREGLEQLVDPALAGTYNFDDMAKVAAIASMCVHQEVSHRPFMGEVVQALKLIYNDADETCGDYCSQKDSSVPDSADFKGDLAPSDSSWWNLTPRLRYGQASSFITMDYSSGPLEDMENRPHSASSIPRVGGLILPNRSGPLRPMRSRRNFFRLRGSMSEHGGPSSSRHLWSGNGDWL

SEQ ID NO: 25 - DNA, 369 bp, Oryza sativa
atgccaactagtagagtcgacctgctgagccggatgcactcgccgtacctggtggggttgctgggctactgcgccgaccagagccaccgtctgctggtgttcgagttcatgcccaacggcagcctcaagagccacctccaccggcgcgcgctggcgccggcggagcagccgccgccgctggactggcagacgcggctgggcatcgcgctggactgcgcccgcgcgctggagttcctccacgagcacagctcccccgccgtgatccaccgcgacttcaagtgcagcaacatcctcctcgaccacaactaccgcgcccgcgtctccgacttcggcatgggcaagctcggctccaacaaggccaatggccag

SEQ ID NO: 26 - protein, 123 aa, Oryza sativa
MPTSRVDLLSRMHSPYLVGLLGYCADQSHRLLVFEFMPNGSLKSHLHRRALAPAEQPPPLDWQTRLGIALDCARALEFLHEHSSPAVIHRDFKCSNILLDHNYRARVSDFGMGKLGSNKANGQ

SEQ ID NO: 27 - DNA, 1233 bp, Oryza sativa
atggcggatgcttgggcggcgtcccctccatctcctacggctccttcgcctttcgccgcggacgacctcgtcgacgcgcggctcgcgccgtggccgccgttcgccccgtggccggcgcccgggcagctccaccacaaccgccgcggcggcgggcacccgaacccgctcttcaccatcctgccggcctcggcgctggcaataggggtcgtgctgcttgtcgccgtggtcgtcatcctggtgatgacgcgtcggtggaagcccggggcggtggacggcgccggcggcgccagctgcaacggcgacaagcctggcggcgcccccgcgtccagctgcggcagcagcgtccgcggctacaacaactccaggtactacgccgccgccgccgccgggtgcatatatggcggaaggctgggtttctcggtgcagccgcggaaccgcggcgcgcaagtgttcacgtaccgggagctggagagcgcgacggacgggttcagcgagtgcaacgtggtgggccgcggcgcgtacggcgtggtcttccgcggccggctcggcgacggcaccacggccgccatcaagcggctcaagatggacggccggcgcgagggcgagcgcgagttccgcatcgagatgggcgttgctattactgctcaggtcgacctgctgagccggatgcactcgccgtacctggtggggttgctgggctactgcgccgaccagagccaccgtctgctggttttcgagttcatgcccaacggcagcctcaagagccacctccaccggcgcgcgctggcgccggcggagcagccgccgccgctggactggcagacgcggctgggcatcgcgctggactgcgcccgcgcgctggagttcctccacgagcacagctcccccgccgtgatccaccgcgacttcaagtgcagcaacatcctcctcgaccacaactaccgcgcccgcgtctccgacttcggcatggccaagctcggctccaacaaggccaatggccaggtggccgccatcacggcgatgtgcatacagacgaaggcggactaccggccgctgatgacggacgtggtgcagtcgctgatccccatcgtgaagagcccactcatgtcctgcacctccacgccgctgaggcccgcgcacgggcaccaccacgtcgtctacatgagcccgagcaggggctcttccaacggcggtgccctggaaacgcgatgcgtcatgcacggcttggattga

SEQ ID NO: 28 - protein, 410 aa, Oryza sativa
MADAWAASPPSPTAPSPFAADDLVDARLAPWPPFAPWPAPGQLHHNRRGGGHPNPLFTILPASALAIGVVLLVAVVVILVMTRRWKPGAVDGAGGASCNGDKPGGAPASSCGSSVRGYNNSRYYAAAAAGCIYGGRLGFSVQPRNRGAQVFTYRELESATDGFSECNVVGRGAYGVVFRGRLGDGTTAAIKRLKMDGRREGEREFRIEMGVAITAQVDLLSRMHSPYLVGLLGYCADQSHRLLVFEFMPNGSLKSHLHRRALAPAEQPPPLDWQTRLGIALDCARALEFLHEHSSPAVIHRDFKCSNILLDHNYRARVSDFGMAKLGSNKANGQVAAITAMCIQTKADYRPLMTDVVQSLIPIVKSPLMSCTSTPLRPAHGHHHVVYMSPSRGSSNGGALETRCVMHGLD

SEQ ID NO: 29 - DNA, 1365 bp, Oryza sativa
atgtcgagcggcggcggcggcggcgacgactacaagcgggaggagtcggtggcactcatggtcatcgtctccctcgcggcgctctccctcctctccctcgtcgccgccttcgcctactactgctacatcacccgcaaggtctcccgccgcctccactcgctcgacctccccaagcaccaccgccgctcctcctcctcctcgcctcctcccatgcccccgccgctgcctccccctcctccttccgcgaatgccccgacgctcgggaaggagagcccgtccagcaactccgccagcgacggcgcggcggcggcggtcgtggtcggcggggagaggggggccgtccaggtgttcagctaccgccagctgcacgccgccacgggcgggttcgggcgggcgcacgtggtggggcaggggagcttcggggccgtctaccgcggggtgctccccgatgggaggaaggtcgcggtcaagctcatggatcgccccggcaagcagggggaagaggagttcgagatggaggtggagctgctgagtcggcttcgatcaccttatcttttgggcttgattggccattgttcagagggtggacaccggctgctggtctatgaattcatggccaatgggggtctccaggagcatctctacccaaatggagcttttgaaaagattgaaacattttcgatctacttggtgaaacaacgcccgatttttgacaaaaatatcgggcacccgatttgtaggcgcgcccatttttctcgtcaactgatatcccacaaagctgacattgtaggttcctgtggtggtatctcaaaattggactggcctactagaatgagaatagctcttgaagcagcaaaaggtctggaatatcttcacgagcgtgttaatccacctgttatacacagagacttcaagagcagcaacattctactggacaaggacttccgtgcaagagtgtcagattttggtttggctaagcttggatctgatagagctggtggtcatgtatcaactcgagttctaggcacacaaggttatgttgcaccagattacggtgttgtacttctggagttgcttactggcagggtgccagttgatatgaagaggcctccaggcgaaggtgttctagttaactgggcattgcctatgctcacagaccgagagaaggttgtgcagatcttggatcctgcactggagggtcaatattcattgaaagatgctgtccaagtggctgccattgctgccatgtgtgttcaacaagaggctgactacaggccactaatggctgatgtggttcaatcgttggttccgcttgtcaagaatcgttctactccaaagacgtgcaaccctagtgtccaagcgtag

SEQ ID NO: 30 - protein, 454 aa, Oryza sativa
MSSGGGGGDDYKREESVALMVIVSLAALSLLSLVAAFAYYCYITRKVSRRLHSLDLPKHHRRSSSSSPPPMPPPLPPPPPSANAPTLGKESPSSNSASDGAAAAVVVGGERGAVQVFSYRQLHAATGGFGRAHVVGQGSFGAVYRGVLPDGRKVAVKLMDRPGKQGEEEFEMEVELLSRLRSPYLLGLIGHCSEGGHRLLVYEFMANGGLQEHLYPNGAFEKIETFSIYLVKQRPIFDKNIGHPICRRAHFSRQLISHKADIVGSCGGISKLDWPTRMRIALEAAKGLEYLHERVNPPVIHRDFKSSNILLDKDFRARVSDFGLAKLGSDRAGGHVSTRVLGTQGYVAPDYGVVLLELLTGRVPVDMKRPPGEGVLVNWALPMLTDREKVVQILDPALEGQYSLKDAVQVAAIAAMCVQQEADYRPLMADVVQSLVPLVKNRSTPKTCNPSVQA

SEQ ID NO: 31 - DNA, 1923 bp, Oryza sativa
ggcccccaaacccctcaaaaccctcgtcgtcttctcgcgatcgctattccctcctccattcctcctcctccacctccgagacctagggttccaatgtcgagcggcggcggcggcggcgacgactacaagcgggaggagtcggtggcactcatggtcatcgtctccctcgcggcgctctccctcctctccctcgtcgccgccttcgcctactactgctacatcacccgcaaggtctcccgccgcctccactcgctcgacctccccaagcaccaccgccgctcctcctcctcctcgcctcctcccatgcccccgccgctgcctccccctcctccttccgcgaatgccccgacgctcgggaaggagagcccgtctagcaactccgccagcgacggcgcggcggcggcggtcgtggtcggcggggagaggggggccgtccaggtgttcagctaccgccagctgcacgccgccacgggcgggttcgggcgggcgcacgtggtggggcaggggagcttcggggccgtctaccgcggggtgctccccgatgggaggaaggtcgcggtcaagctcatggatcgccccggcaagcagggggaagaggagttcgagatggaggtggagctgctgagtcggcttcgatcaccttatcttttgggcttgattggccattgttcagagggtggacaccggctgctggtctatgaattcatggccaatgggggtctccaggagcatctctacccaaatggaggttcctgtggtggtatctcaaaattggactggcctactagaatgagaatagctcttgaagcagcaaaaggtctggaatatcttcacgagcgtgttaatccacctgttatacacagagacttcaagagcagcaacattctactggacaaggacttccgtgcaagagtgtcagattttggtttggctaagcttggatctgatagagctggtggtcatgtatcaactcgagttctaggcacacaaggttatgttgcaccagaatatgctttgaccgggcatttgacgaccaaatccgatgtctatagttacggtgttgtacttctggagttgcttactggcagggtgccagttgatatgaagaggcctccaggcgaaggtgttctagttaactgggcattgcctatgctcacagaccgagagaaggttgtgcagatcttggatcctgcactggagggtcaatattcattgaaagatgctgtccaagtggctgccattgctgccatgtgtgtttaacaagaggctgactacaggccactaatggctgatgtggttcaatcgttggttccgcttgtcaagaatcgttctactccaaagacgtgcaaccctagtgtccaagcgtagaagccacttgaaggggaagttgaatgctcagtttccaggttggtgcttgacttttctggaaattttcatctacatctaacaactactgctgagtttatgagatcagtatgctccataacttaattctcttcctctgccagtgaattcctgattttgcgaggtgaatcgtaagcagttagatttagaaatcaagcattaatttagttcgatggaccagaaagctagtttcagtttgaagggaagtcctctagtcatgtgcaattagtgatcatgttaggtggtttggcttagtacttatggttgtgccctgtgggaatgatcagagagtgttgtttccagctggcagaattgcaatgtactgctgaattttcttttggcttgtcaattatgttaggtgtctttggagatccatgttcgttgtcttaactcttgtgctaatacgttggtctcatcagcttggcctataaacatcgccgatgtatctttttgtatatgtatatagtaggattctggaacttataaaaacaaacatttgccagttgagcattttcatgc

SEQ ID NO: 32 - protein, 419 aa, Oryza sativa
GPQTPQNPRRLLAIAIPSSIPPPPPPRPRVPMSSGGGGGDDYKREESVALMVIVSLAALSLLSLVAAFAYYCYITRKVSRRLHSLDLPKHHRRSSSSSPPPMPPPLPPPPPSANAPTLGKESPSSNSASDGAAAAVVVGGERGAVQVFSYRQLHAATGGFGRAHVVGQGSFGAVYRGVLPDGRKVAVKLMDRPGKQGEEEFEMEVELLSRLRSPYLLGLIGHCSEGGHRLLVYEFMANGGLQEHLYPNGGSCGGISKLDWPTRMRIALEAAKGLEYLHERVNPPVIHRDFKSSNILLDKDFRARVSDFGLAKLGSDRAGGHVSTRVLGTQGYVAPEYALTGHLTTKSDVYSYGVVLLELLTGRVPVDMKRPPGEGVLVNWALPMLTDREKVVQILDPALEGQYSLKDAVQVAAIAAMCV

SEQ ID NO: 33 - DNA, 3912 bp, Oryza sativa
atggcgcggatacggcgcgcgagctccggacgagacatgtcagataatttggtgcagcataacagacgctcagaagcagaaatttctactcatgtagatgctgcgcctcctgatgcagcctcaaatactagtgcagctccttctggattagtacaacctccagtatctcctcacaatgcatgttgttcacataacatggtacaaaagagagggagccaagattgccattgtgtttacccagtaagagttgagctttttctccgaaatgtttcactgacgtcaaattggagcgatgaatttctgggggaacttgcttctcaactcagtctgagggttactcagtttgagattgtaaatttctatgttgttggggcttctgggctaaacatcacaatgtatatagctccccatacaggaattagtttctcagccgaccaagttaccgcaatgaattattcacttagtcagcatacagttcagatcaaccctgtactagttggtgactacaatcttcttaatttaacctggttcaggccactggttctagctcctgtttattttagtgttaaggtagagaacactaaaaggatgtttggtgatatcaatatgatacttcctatgaatgatataaacattatttctttatatttacagccctctccaacattcacaatatcacctaaaccctctccatctcaagcatctacagtaccaagacacagtgcggataccagcaatgaaaaacacatgagcttgattactatcatttgcatatttattggtgctctaattgctgtcttggtgattgccatgtttatttgcttctgcaaattaaggaaagggaaaaggaaggttcctccagttgagacacccaagcaaagaacaccagatgcggtttctgcagtggactcacttcctcgcccaacaagtacaaggttccttgcatatgatgaactgaaagaagcaaccaacaactttgatccgtcaagtatgcttggagaaggaggttttggccgtgtctttaaaggggtactaactgatggcactgccgttgctataaagaagcttactagtggagggcaccaaggagataaggaatttctagttgaagtggagatgctgagcaggttgcaccaccgaaaccttgtgaaactcattggttactatagtaaccgtacattgggagctagccgccccttggactgggacactagaatgaggatagcactagatgctgccaggggattggcataccttcatgaggattctcagccttgcgtaatccacagggatttcaaggcttctaatatattgcttgaggatgactttcatgctaaagtgtctgattttggtttggccaaacaggcaccggaaggtcgcacaaattatctctcaacacgtgttatgggaacattcgggtatgtagcaccagagtatgcaatgacaggacacttgcttgtaaaaagcgatgtatatagctatggagttgttctacttgaactacttactgggaggaggcctgtggatatgtcacaaccttctggccaggaaaatctagtgacatggcttacacaaatgtttcctgatctttccactaaaagccttgtgtcacatcaacctttgctggccaagttgtcaggtgtagagatacttatttgctcaattttgactacgcaggcacgaccaattttacgagataaagatacgctagaagaactagctgatcccaagcttggtggccagtatccaaaagatgattttgtgcgagtatgcacaattgcagccgcctgtgtttcaccggaggcaagccaaaggccaacaatgggcgaggtggtgcagtcactgaagatggtccaacgctctgagttccaggaatccataccaacacctccagcacgacccaatgcctcagcccctttgagactgagaacatatcgagaacggctttctctgaagatcttcacgaagggcggtaacagtggtgaacaagacccggccaccatggtcggcttcgccgaccagaccgccgacgtctccgccgccgcgttccagaccatgtaccgcctcaacgtcggcggcgcctacatcccgccgtccaacgactccggcctcacgcggccgtggtacgacgacacgccgttcgtccagggccccctgcgcggcctcgtctacaacgccggcccgcacttccacatcaagtaccccagcgacgccgccgagtacgccgcgccgccggaggtgtacctcggcggccgctccatgggcagggaccagcgcctcaaccagaactccaacctcacctggagcctccacgtggagtgcaacttcacctacgtcgtgcgcctccatttctgcgagctccagctcatccacggcaaccagcgggtgttcgacatctacatcaacaaccggacggcgcagacggacgtggacgtgctggagatggcgacggagcgcggcgtgccggtgtacaaggactacgcggtgaggctgagcaacgacaccgccgacgagcatctgtgggtggcggtgcacccctcggtgatgctccgcccgcagttctacgacgccatcctcaacggcctcgaggtgttcaaggtgaacaacaccggcggcagcctggcgtcgccggaccccgtcccgtacaagctgctcgcggagaaggagctcggctggggcgggccgccggagttctccaccgacaacccggccaacatggcgtcggtgatgggcggcacggcgggcggcgcggcggcggccgggatcgtggcggccatctgcgtggtggtgtacagcaacaagaggagcaagaagctgggcggcggcggcgccgactcgcacacctccgcgtggctgccgctgtaccactcccacaccagcggcaagtcgtcggggcacatcacggcgaacatcgccggcatgtgccgccacttctcgttcgcggagatcaaggcggcgaccaagaacttctccaacgacctggccatcggcgtgggcgggttcggcgtggtgtaccgcggcgtggtggacggcgacgtgaaggtggcggtgaagcggtccaacccgtcgtcggagcaaggcataaccgagttccagacggaggtggagatgctctccaagctccgccaccgccacctcgtctccctcatcggcttctgcgaggaggacggcgagatggtgctcgtctacgactacatggagcacggcaccctgcgcgagcacctctaccacaacggcggcaagcccacgctgtcgtggcgccaccgcctcgacatctgcatcggcgccgcccgcggcctccactacctccacaccggcgaatcgcacgtcagcaccgtcgtcaagggcagcttcggctacctcgacccggagtactaccgccggcagcagctcaccgacaagtccgacgtctactccttcggcgtcgtgctgttcgaggtgctcatggcgcgcccggcgctcgacccggcgctgccgcgcgaccaggtcagcctcgccgactacgcgctcgcctgcaagcgcggcggcgcgctgccggacgtcgtcgacccggcgatcagggaccagatcgcgcccgagtgcctcgccaagttcgccgacacggcggagaagtgcctctccgagaacggcaccgagcgccccaccatgggcgacgtgctctggaacctcgagagcgcgatgcacttccaggacgcgttcgacgccgccgccggccgccccgtccccgcgctcgacgccgccgccggcagcagcagccacctcgacgacgggagcacggccagcatcaacacgctggccacgtcgtccacgtcgcacccgcacgagccgtgcgtcgacgttgtcttggagcccgacgacgtcgtcgcggagcgcgccaccttctcgcagctcgtccagcccaccggccggtga

SEQ ID NO: 34 - protein, 1303 aa, Oryza sativa
MARIRRASSGRDMSDNLVQHNRRSEAEISTHVDAAPPDAASNTSAAPSGLVQPPVSPHNACCSHNMVQKRGSQDCHCVYPVRVELFLRNVSLTSNWSDEFLGELASQLSLRVTQFEIVNFYVVGASGLNITMYIAPHTGISFSADQVTAMNYSLSQHTVQINPVLVGDYNLLNLTWFRPLVLAPVYFSVKVENTKRMFGDINMILPMNDINIISLYLQPSPTFTISPKPSPSQASTVPRHSADTSNEKHMSLITIICIFIGALIAVLVIAMFICFCKLRKGKRKVPPVETPKQRTPDAVSAVDSLPRPTSTRFLAYDELKEATNNFDPSSMLGEGGFGRVFKGVLTDGTAVAIKKLTSGGHQGDKEFLVEVEMLSRLHHRNLVKLIGYYSNRTLGASRPLDWDTRMRIALDAARGLAYLHEDSQPCVIHRDFKASNILLEDDFHAKVSDFGLAKQAPEGRTNYLSTRVMGTFGYVAPEYAMTGHLLVKSDVYSYGVVLLELLTGRRPVDMSQPSGQENLVTWLTQMFPDLSTKSLVSHQPLLAKLSGVEILICSILTTQARPILRDKDTLEELADPKLGGQYPKDDFVRVCTIAAACVSPEASQRPTMGEVVQSLKMVQRSEFQESIPTPPARPNASAPLRLRTYRERLSLKIFTKGGNSGEQDPATMVGFADQTADVSAAAFQTMYRLNVGGAYIPPSNDSGLTRPWYDDTPFVQGPLRGLVYNAGPHFHIKYPSDAAEYAAPPEVYLGGRSMGRDQRLNQNSNLTWSLHVECNFTYVVRLHFCELQLIHGNQRVFDIYINNRTAQTDVDVLEMATERGVPVYKDYAVRLSNDTADEHLWVAVHPSVMLRPQFYDAILNGLEVFKVNNTGGSLASPDPVPYKLLAEKELGWGGPPEFSTDNPANMASVMGGTAGGAAAAGIVAAICVVVYSNKRSKKLGGGGADSHTSAWLPLYHSHTSGKSSGHITANIAGMCRHFSFAEIKAATKNFSNDLAIGVGGFGVVYRGVVDGDVKVAVKRSNPSSEQGITEFQTEVEMLSKLRHRHLVSLIGFCEEDGEMVLVYDYMEHGTLREHLYHNGGKPTLSWRHRLDICIGAARGLHYLHTGESHVSTVVKGSFGYLDPEYYRRQQLTDKSDVYSFGVVLFEVLMARPALDPALPRDQVSLADYALACKRGGALPDVVDPAIRDQIAPECLAKFADTAEKCLSENGTERPTMGDVLWNLESAMHFQDAFDAAAGRPVPALDAAAGSSSHLDDGSTASINTLATSSTSHPHEPCVDVVLEPDDVVAERATFSQLVQPTGR

SEQ ID NO: 35 - DNA, 2463 bp, Oryza sativa
atggcgcggatacggcgcgcgagctccggacgagctcaactctcaggccgtgagaatttgggtttggtgtcgcgggaatggtggtcatactactatgtaggattcagtgctctctgctgccgtggcgatactggatatctggaatctgatcgaagaacctctgatctaagtttgagtcactacaaatggatttgtgatattgattatcaaattcaggccaatggatcctcctttacaagaaaatggtcattactgaactcttgttactggaatgatgagaattcctgcattgctgggtttgcggaaaggcttttggaagatgctcgaaggaaaaccttcttaaattttttggctgtggtatttactctggaattgattaccagaatcaatttgattgcccaaacatcagctctaaatgtggttgcccctgctatatctccatctcaaagttggagaccagttcgctccatgttgtcaaaagctaaagttgacattagtatttcagtcagcgaacaaagacgaaagaagctatattcatcaccagctactctatctgtgcaccctccaatgtcagcgccaagctatagctccatttctgacatgtcagataatttggtgcagcataacagacgctcagaagcagaaatttctactcatgtagatgctgcgcctcctgatgcagcctcaaatactagtgcagctccttctggattagtacaacctccagtatctcctcacaatgcatgttgttcacataacatggtacaaaagagagggagccaagattgccattgtgtttacccagtaagagttgagctttttctccgaaatgtttcactgacgtcaaattggagcgatgaatttctgggggaacttgcttctcaactcagtctgagggttactcagtttgagattgtaaatttctatgttgttggggcttctgggctaaacatcacaatgtatatagctccccatacaggaattagtttctcagccgaccaagttaccgcaatgaattattcacttagtcagcatacagttcagatcaaccctgtactagttggtgactacaatcttcttaatttaacctggttcaggccactggttctagctcctgctccaacattcacaatatcacctaaaccctctccatctcaagcatctacagtaccaagacacagtgcggataccagcaatgaaaaacacatgagcttgattactatcatttgcatatttattggtgctctaattgctgtcttggtgattgccatgtttatttgcttctgcaaattaaggaaagggaaaaggaaggttcctccagttgagacacccaagcaaagaacaccagatgcggtttctgcagtggactcacttcctcgcccaacaagtacaaggttccttgcatatgatgaactgaaagaagcaaccaacaactttgatccgtcaagtatgcttggagaaggaggttttggccgtgtctttaaaggggtactaactgatggcactgccgttgctataaagaagcttactagtggagggcaccaaggagataaggaatttctagttgaagtggagatgctgagcaggttgcaccaccgaaaccttgtgaaactcattggttactatagtaaccgtgagtcatcacagaacctactgtgctatgagcttgttcctaatggaagcctagaggcttggcttcatggtacattgggagctagccgccccttggactgggacactagaatgaggatagcactagatgctgccaggggattggcataccttcatgaggattctcagccttgcgtaatccacagggatttcaaggcttctaatatattgcttgaggatgactttcatgctaaagtgtctgattttggtttggccaaacaggcaccggaaggttgcacaaattatctctcaacacgtgttatgggaacattcgggtatgtagcaccagagtatgcaatgacaggacacttgcttgtaaaaagcgatgtatatagctatggagttgttctacttgaactacttactgggaggaggcctgtggatatgtcacaaccttctggccaggaaaatctagtgacatgggcacgaccaattttacgagataaagatacgctagaagaactagctgatcccaagcttggtggccagtatccaaaagatgattttgtgcgagtatgcacaattgcagccgcctgtgtttcaccggaggcaagccaaaggccaacaatgggcgaggtggtgcagtcactgaagatggtccaacgctctgagttccaggaatccataccaacacctccagcacgacccaatgttaggcagtcctcaaccacctatgaatctgatggcacttcatccatgttctcttctggacccttttcaggcctcagcccctttgagactgagaacatatcgagaacggctttctctgaagatcttcacgaagggcggtaa

SEQ ID NO: 36 - protein, 820 aa, Oryza sativa
MARIRRASSGRAQLSGRENLGLVSREWWSYYYVGFSALCCRGDTGYLESDRRTSDLSLSHYKWICDIDYQIQANGSSFTRKWSLLNSCYWNDENSCIAGFAERLLEDARRKTFLNFLAVVFTLELITRINLIAQTSALNVVAPAISPSQSWRPVRSMLSKAKVDISISVSEQRRKKLYSSPATLSVHPPMSAPSYSSISDMSDNLVQHNRRSEAEISTHVDAAPPDAASNTSAAPSGLVQPPVSPHNACCSHNMVQKRGSQDCHCVYPVRVELFLRNVSLTSNWSDEFLGELASQLSLRVTQFEIVNFYVVGASGLNITMYIAPHTGISFSADQVTAMNYSLSQHTVQINPVLVGDYNLLNLTWFRPLVLAPAPTFTISPKPSPSQASTVPRHSADTSNEKHMSLITIICIFIGALIAVLVIAMFICFCKLRKGKRKVPPVETPKQRTPDAVSAVDSLPRPTSTRFLAYDELKEATNNFDPSSMLGEGGFGRVFKGVLTDGTAVAIKKLTSGGHQGDKEFLVEVEMLSRLHHRNLVKLIGYYSNRESSQNLLCYELVPNGSLEAWLHGTLGASRPLDWDTRMRIALDAARGLAYLHEDSQPCVIHRDFKASNILLEDDFHAKVSDFGLAKQAPEGCTNYLSTRVMGTFGYVAPEYAMTGHLLVKSDVYSYGVVLLELLTGRRPVDMSQPSGQENLVTWARPILRDKDTLEELADPKLGGQYPKDDFVRVCTIAAACVSPEASQRPTMGEVVQSLKMVQRSEFQESIPTPPARPNVRQSSTTYESDGTSSMFSSGPFSGLSPFETENISRTAFSEDLHEGR

SEQ ID NO: 37 - DNA, 2670 bp, Oryza sativa
atggggcggcgtggaggaggaggacgagcgggaggcgcgtggattggtggctgtgtacttgcgctcgccgccaccttggtcgtctgcgtgctcgtgatccgtggagctggaggactaaatgtaaaaccacctgcagcaactagcagacgtgttaacatacagcaggaactatatgcaccaagcccaacgatcagccacagaggtcttgctattcctccacttccaacaacttcatccccagttttcccacctcccatcagatcttatcctccacttcctgcaaataagccataccccaatagtccagttgtggcacctccaaagggaaggcatcaccattctttgcctgtaaataatacccgtgtaaaaggacctgcctattctccttcaaattctcccagtatccatagaaaacatggcattccagttgctgcacctccaaagcaacattccagcaatttaccaccttcacatcataggccccacaaaggatcctttcctgtcataagccctactccacataaagctgataatgcttctgcgacgaaacatggacgttctggcttacaccatagtcctgcacctgcacctgtaggcttgcctccatctgaaggaaatgcacgaggaaatcctgcgtatgcaccacgtcatccccatgaatatcactcgccttcaaattctccagaacctggtctaccacctgtgaatccgcctgacagtcatgcatttaaaaagcccaagagtttggcaccagcaccccaatcatttccgccaccgcctctgagttcatattgcatggcgttaaattgtcaagatcctctgaccaatagtctccctggaactacatgtctttgtgtgtggccaataaaagttgagcttcgtttaggtatagctttgtacacattctttgcattggtatcagaacttgcacaagatattgcatctggagtgctcatgaaacaaagtcaagttcgtgtaatgggagcaaatgctgcaactgaggacccagagaaaacagttgtccttattgatcttgtgccactgggagaaaaatttgacaaggcaacagcacttttagtatttgaaaggttttggcacaagcaggtcaacataaactctatgcattttggaaactatgatgtgttatatgttacctaccaaggtcttcctccgtcgccaccaacagctcccgggatgaacaatggtcttagcaatgttaatgatccaaggttgcatccacttgctgttgatgtgggaaaccacagagaaacaaaaagcaggggcataattgttataattgttctttcaagtgtctttgcttttattttatgttctggagctgcgttggtaatttgtttcaagattagaaaccgcaaccatttaactgaagagtcacctatgccaccgaagcctgcaggtcctgggtctgcagttgttgggagcaggctaggaagcagacctatttcagcatctccatctttcagctcaagcatagtgacatataaagggacagcgaaaacatttagcttgattgagatggaaagagctacacaaagatttgacaactccagaattattggcgagggtggttttggacgtgtttatgaaggtattcttgaggatggagaacgggttgctgtcaaaattcttaagagggacgaccagcaaggtacacgggaatttttagctgaggttgagatgcttagccgattgcatcacagaaacctggttaagttgataggtatatgcacagaagaacatatccggtgtcttgtgtatgagcttgttccaaatggtagtgtggaatctcacttgcacggatcagataagggaactgctccactttattgggatgctaggcttaaaattgcacttggtgctgcacgtgctcttgcttatttgcatgaagattctagtccccgtgtcatacaccgtgacttcaagtcaagtaacatcttattggaacatgacttcacccccaaggtgtcagactttggcctagcaagaacagccataggtgaggggaatgagcatatttcaactcgtgttatgggaactttcgggtatgttgctcctgaatacgcaatgactgggcatcttctagtaaagagtgatgtctacagctatggtgtcgtcctccttgagcttcttaccggaaggaaaccggtggatattttgagacctccagggcaagaaaatttagttgcatgggcttgtccttttcttactagcagagatggcttggaaacaataattgatccatcacttggaaatagcatcctatttgacagcattgcaaaagtagcagctattgcttctatgtgcgtgcagcctgaggtggatcagcgcccatttatgggtgaagttgttcaagctttgaagttggtatgcgatgaaggcagcgagttcaatgaatcaagaagtttcagccaagatttacatattcaggattctgggattataagtagagcaagcctggatgtggacgtagaacctgttgtatctgctgagctgttcaatgcatcagcacattatgacactcttgatgcatctggttcttttcgacgatattcaagttcaggtcctcttagggtaggtagaaccgggcacaataggggtagctcaagcgagcactgtggtacacaaagattcaggatagattcagagtag

SEQ ID NO: 38 - protein, 889 aa, Oryza sativa
MGRRGGGGRAGGAWIGGCVLALAATLVVCVLVIRGAGGLNVKPPAATSRRVNIQQELYAPSPTISHRGLAIPPLPTTSSPVFPPPIRSYPPLPANKPYPNSPVVAPPKGRHHHSLPVNNTRVKGPAYSPSNSPSIHRKHGIPVAAPPKQHSSNLPPSHHRPHKGSFPVISPTPHKADNASATKHGRSGLHHSPAPAPVGLPPSEGNARGNPAYAPRHPHEYHSPSNSPEPGLPPVNPPDSHAFKKPKSLAPAPQSFPPPPLSSYCMALNCQDPLTNSLPGTTCLCVWPIKVELRLGIALYTFFALVSELAQDIASGVLMKQSQVRVMGANAATEDPEKTVVLIDLVPLGEKFDKATALLVFERFWHKQVNINSMHFGNYDVLYVTYQGLPPSPPTAPGMNNGLSNVNDPRLHPLAVDVGNHRETKSRGIIVIIVLSSVFAFILCSGAALVICFKIRNRNHLTEESPMPPKPAGPGSAVVGSRLGSRPISASPSFSSSIVTYKGTAKTFSLIEMERATQRFDNSRIIGEGGFGRVYEGILEDGERVAVKILKRDDQQGTREFLAEVEMLSRLHHRNLVKLIGICTEEHIRCLVYELVPNGSVESHLHGSDKGTAPLYWDARLKIALGAARALAYLHEDSSPRVIHRDFKSSNILLEHDFTPKVSDFGLARTAIGEGNEHISTRVMGTFGYVAPEYAMTGHLLVKSDVYSYGVVLLELLTGRKPVDILRPPGQENLVAWACPFLTSRDGLETIIDPSLGNSILFDSIAKVAAIASMCVQPEVDQRPFMGEVVQALKLVCDEGSEFNESRSFSQDLHIQDSGIISRASLDVDVEPVVSAELFNASAHYDTLDASGSFRRYSSSGPLRVGRTGHNRGSSSEHCGTQRFRIDSE

SEQ ID NO: 39 - DNA, 2913 bp, Oryza sativa
atgcggtcgctcgcttgttgcgcggtgcttcttctcgcttcggttcttggatctacaggtactgatctgggtccttctcctgtggtcgctaactcgccagatgctcaagatcaaacttctagccctcctgaacctacaatcgccctcggtccagtaactcttccaacaggttgctctgaatttctaatgtggtgtggcattatggctctcaagatcataaccagcattgacaattgtccttacaattgctttgtctcagcaccctctgctccatcagcaagccctcctgtggcgaagggcgctgtcagcccagctgttcccactcgaccacaaaatgcgcctactccagtaacaccccctaaagaatataatgcgcctcctccagttgagcttacgcctcctgctcccactcatgtggcgccagtagctcccccgcaagctgcagttgaaaatcctgcaccagtgcttcctgggacacctgctttgttgccttctgttcaggctcctgctccatctgtggccaggaatcctaatctaccgatagtgcaacctccttctgtgaacaatccaccaagcggaccaattggatcagggaatggcgtccctccgtatccaccacctcaaagaagtttacctgccattcctccttccacttcaggagttccgcgagaaagtgtaaaacctccagttgcaccacctattattgcacaagcaccacgtcagcaagcactggcaccaagtagtgaccatagcaatggaaactcagtgcccccagcaaatacatcacctccccataagaatagtcatattccacgtgcactgccaccaaaggaatccagtagtcaaactggcacagctcacaaaccgccaattagagggcctcatatttctccaaccatgccaccaatccctccccaaccagggccgaaagcaccatcagcccatcctatttgggcattacctccaccaccgcctaatctagattgcaattcattagcatgcccagagcctctaacagatccacctgcgggagccccatgtgtttgtgttctaccaatcaaagttggagtccgcttaagtgttgatctgtattcattctttccattggtatctgattttgcggaagaagtgtcatctggggtaaatatggcacagagacaggttcgtgttatgggtgcaaatgtagctggtgatcagcctgacaagacagtagttcttgttgacctagtaccaatgcaagtgaagtttgacaatgctactgcttttttaacgtttgaaaacttatggagcaaaaaaatttccctaaaaccatcagtttttggggactacgagattctgtatgttgtatatccagggcttcctccttctccaccttcagcaccggaaagtgttggtgacggggcatttggaaacaacagaaatgcaagggcaatgaagcctctcggggttgatgtaggcaggcccaaaaaaagagtcaacggcagcctaattgctattgccgtcttgtctactgttatagcattgattatttgcactctagctgcatggttgctgataatcagattcaggggttcggatggcttggctcaaagatttccacatagcgcacttccaaaattttccagatcatctggtacaggtcaaacactgttagctggtcgctatagttcaccatcaggtccatcaggttcattgggctcaagtatcgcaacatatgcaggacaggcaaagacattcaaatttgctgagattgagaaggccacaaacagctttgatgattcaacagtacttggagagggtggcttcggatgtgtctaccagggcacgcttgaagatggaaccagggttgcagtaaaggttctgaagaggtatgatggccaaggcgagagagagttcttggctgaggttgagatgctgggacgcttgcatcaccgaaatttggtcaagttgttaggcatatgtgtagaggagaacgcaagatgtctggtttatgaacttattccgaatggcagtgtagaatcccatttgcatggagtggatcttgagacagcaccactcgattggaatgcccgcatgaagatagccttgggggctgcacgagctcttgcatatttacacgaagattcaagcccttgtgtgattcatcgtgattttaagtcaagcaacatcctattggagcatgatttcacaccgaaagtgtctgatttcggactggccaggactgcaaggggggaggggaaccagcacatctccactcgtgtcatgggaacatttggatatgttgcaccggagtatgccatgacaggacatctccttgtcaagagcgatgtgtacagctatggagtagtgttgcttgagctcctcaccggtagaaagccagtggacatgtctaggcccggggggcaagaaaacctagtttcatgggctcgcccgcttctgaccaatgtggtaagcctacgtcaagctgttgatccacttcttggccctaacgtacccctggacaatgtcgcaaaagcagctgccatcgcatcaatgtgtgtacaacctgaggttgcgcatcgcccgagcatgggtgaagtagtgcaggccttaaaacttgtttgcagtgacggtgatgagggcctcggatcaggaagtttcagccaggaattggcggcacaagctgcagcaatctatgatgtaactggcatggaagctgagagggtgctgttatctgagatgtttggctcaacccctgtcttcactcccgctgcggattcaggttctttccgaaagcagtccagctcaggtccactgatgacaggcaagaacagaaagttctggcagagattgcgaagcctatcaagagggagtatgagtgagcatggtgcctcaccagattttgagacgcgctcgcagtgtagtaataggtga

SEQ ID NO: 40 - protein, 970 aa, Oryza sativa
MRSLACCAVLLLASVLGSTGTDLGPSPVVANSPDAQDQTSSPPEPTIALGPVTLPTGCSEFLMWCGIMALKIITSIDNCPYNCFVSAPSAPSASPPVAKGAVSPAVPTRPQNAPTPVTPPKEYNAPPPVELTPPAPTHVAPVAPPQAAVENPAPVLPGTPALLPSVQAPAPSVARNPNLPIVQPPSVNNPPSGPIGSGNGVPPYPPPQRSLPAIPPSTSGVPRESVKPPVAPPIIAQAPRQQALAPSSDHSNGNSVPPANTSPPHKNSHIPRALPPKESSSQTGTAHKPPIRGPHISPTMPPIPPQPGPKAPSAHPIWALPPPPPNLDCNSLACPEPLTDPPAGAPCVCVLPIKVGVRLSVDLYSFFPLVSDFAEEVSSGVNMAQRQVRVMGANVAGDQPDKTVVLVDLVPMQVKFDNATAFLTFENLWSKKISLKPSVFGDYEILYVVYPGLPPSPPSAPESVGDGAFGNNRNARAMKPLGVDVGRPKKRVNGSLIAIAVLSTVIALIICTLAAWLLIIRFRGSDGLAQRFPHSALPKFSRSSGTGQTLLAGRYSSPSGPSGSLGSSIATYAGQAKTFKFAEIEKATNSFDDSTVLGEGGFGCVYQGTLEDGTRVAVKVLKRYDGQGEREFLAEVEMLGRLHHRNLVKLLGICVEENARCLVYELIPNGSVESHLHGVDLETAPLDWNARMKIALGAARALAYLHEDSSPCVIHRDFKSSNILLEHDFTPKVSDFGLARTARGEGNQHISTRVMGTFGYVAPEYAMTGHLLVKSDVYSYGVVLLELLTGRKPVDMSRPGGQENLVSWARPLLTNVVSLRQAVDPLLGPNVPLDNVAKAAAIASMCVQPEVAHRPSMGEVVQALKLVCSDGDEGLGSGSFSQELAAQAAAIYDVTGMEAERVLLSEMFGSTPVFTPAADSGSFRKQSSSGPLMTGKNRKFWQRLRSLSRGSMSEHGASPDFETRSQCSNR

SEQ ID NO: 41 - DNA, 1317 bp, Oryza sativa
ggcagatcaactttgtctgttagcagggtgagctctgcatcggcgtcaatgctctcaacagtggcaacttgcacaacatcagtaaagacattttcactttcccagcttgaaaaggccactgatggttttgattcaaaaagagtgttgggtcaaggtgggtttggacgcgtctaccatgggaccatggatggcggagacgagattgctgttaaattgctcacaagagaagacaggagtggcgatcgagagttcattgcggaggttgaaatgctcagtcgactacatcaccgtaatcttgtcaaattgattggcatttgcattgagcacaacaaaaggtgtcttgtttatgagcttatacgcaatggaagtgttgaatctcaccttcatggtgctgataaggctaagggcatgctgaactgggatgttaggatgaaaattgctctgggtgcagctagaggcttagcatatctacatgaagactcaaaccctcatgttatacatcgtgacttcaagggcagcaatatattgttggaggaagatttcactcctaaggttactgattttggtttagcaagggaggcaactaatggaattcaacccatttctactagggtaatgggtacttttgggtacgttgctccagaatatgccatgaccgggcatcttcttgtgaagagtgatgtctacagttacggtgttgtcttgctggagcttttatcaggaaggaagcccgtatgcatgtctgataccaatggtcctcagaaccttgtgacttgggctcgtcctctgctatgccataaggagggtttggagaggttgatcgacccttctctgaatggcaatttcaactttgatgatgtagctaaagtagcatccatcgcttccatgtgtgttcacaatgatccgtcacagaggccattcatgggtgaagtagtgcaggcactgaagcttatttacaatgatgcggaggcggcttgcgatgattcttacagccacagggactcatcgtgtgaccagtacgatgactaccatggggccctggcccttgacagcggtagtggtagctggtggaatagaagctcaaatccttctgggttttttgacaaccggaaccccctaccagttattaccatggaatacagctctggcaggatcgaaggagcgcgtgacccccgctttgcattgtcaacaggtggtcatgcacaatcaccagccctgcagaatagatcaggacccatccggatgaagaaaaagcttgcctcattttaccggtctagaggtagcttcagcgagcatggccagctgcctcgccattga

SEQ ID NO: 42 - protein, 438 aa, Oryza sativa
GRSTLSVSRVSSASASMLSTVATCTTSVKTFSLSQLEKATDGFDSKRVLGQGGFGRVYHGTMDGGDEIAVKLLTREDRSGDREFIAEVEMLSRLHHRNLVKLIGICIEHNKRCLVYELIRNGSVESHLHGADKAKGMLNWDVRMKIALGAARGLAYLHEDSNPHVIHRDFKGSNILLEEDFTPKVTDFGLAREATNGIQPISTRVMGTFGYVAPEYAMTGHLLVKSDVYSYGVVLLELLSGRKPVCMSDTNGPQNLVTWARPLLCHKEGLERLIDPSLNGNFNFDDVAKVASIASMCVHNDPSQRPFMGEVVQALKLIYNDAEAACDDSYSHRDSSCDQYDDYHGALALDSGSGSWWNRSSNPSGFFDNRNPLPVITMEYSSGRIEGARDPRFALSTGGHAQSPALQNRSGPIRMKKKLASFYRSRGSFSEHGQLPRH

SEQ ID NO: 43 - DNA, 2172 bp, Oryza sativa
atgccgccgcggcgagcggcgctgctcctcctcgctctcgccgtgtatgtgccactgggaacggcaagctcaacaactatcgcgtcgtacttacttgggttatggagtagagcacatcggcattctcttcctgcccctgctccagctccagctccagctccagcccctgaaactcaccgacctggtattagacacccagtgcctaggcatcacaggaaaaggcctcatgttgccccaccactaccaccaccatcatcatcagaaagacaagtagcaccatatcagttgtttccaagaattgatgagttagaaattgagattgcagcaggaacatttctgaaacagagtcaagttcggataatgggtgctgggagtagtcttcaagatcctgaaaaaactactgtcaccgttgatttggtgccactaggtcagaagtttgataggacttcagccttactgactagcaacagatttttgcaaaagaaggtgccaataaactcgtccatatttggtgattataacgtaatatatgttcattatcctggcctgccttctttggtccctagtgttccaggatccttgggcccaataagcagtagccaatacccctttagtgcaaatgtacacaatagaagacatcagaagattaactctaaaagtgttgccataattgcattatcagctgttgtgcttgtattaatgagctttggcatttgcatcatatggaaatataaaggatttgaaaagtctcgtggcactggtcgtgtttcgaattcgtcagccacaagaaaaacaggtatgaggtcatcattctccagtatgaccagctcgacggcatcttttgtttcaacaattgcaacatgcccacctacagttaagacattctctatttctgagcttgaaaaggccacagaaaacttcagcttcaacaaaataataggtgaaggagggtatggccgtgtttatcgaggtacaattgatgatgaagttgatgttgcagtcaaattgcttacaagaaaacatcaaaacagagatcgtgagtttattgccgaggttgagatgctaagtcgtttgcatcatcgtaatcttgtcaagctgatcggtatatgcattgaacggagcacaaggtgcttggtgtttgagcttgttccaaacggaagtgtggagtctcatctgcacggttctgataaaatatacggcccacttgattttgatactagaatgaaaatagcccttggtgcagcaaggggtctggcctacctacatgaggatgccaatccccatgttatacaccgtgatttcaaggccagcaacgttcttttggaaaatgatttcactcccaaggttgcggatttcgggttggcaaaggaagcctcagaaggaatggaccatatttctactcaggtcatggggacttttgggtacgttgccccggagtatgcgatgaccgggcatctcctggtgaaaagcgacgtgtacagctacggtgtcgtgctgctggagctcctctcggggaggaagccggtggacatgacgcagccgccggggtcggagaacctcgtcacctgggcgcgccccctcctcaccgaccgggacggcctccagcagctggtcgacccgtcgatgccggcggcgagctacggcttcgagaagctggccaaggcggcggccatcgcgtccatgtgcgtgcacgtcgaggcgtcgcaccggccgttcatgggcgaggtcgtgcaggccctgaagctcatctacaacggcaacaacgacgacacctgcaccagcggctcgttcggcggcggcggcggcgaggagtacgaggacgaggaggcgtcgtcgccgtggaacaaccgctcgtggagccacgacttcgccgcgacgccgccgccggcgtcgcgcaggctggcgttcccgcgggctccggcccgcccgacgacgatggactacagctcggacccggccgacggggcggcggggacgtcgtcggcgtcggcgcggcggcagcggtcgacgtcgagcctggtgctggacaagatcgagtcgctggcggcgtacgactggtccggcccgctgagggccagcagggggaggaacttctacaggctgaggggaagcatgagcgagcatggcggccatccttccgaagattgctccatggagggctactggatgtag

SEQ ID NO: 44 - protein, 723 aa, Oryza sativa
MPPRRAALLLLALAVYVPLGTASSTTIASYLLGLWSRAHRHSLPAPAPAPAPAPAPETHRPGIRHPVPRHHRKRPHVAPPLPPPSSSERQVAPYQLFPRIDELEIEIAAGTFLKQSQVRIMGAGSSLQDPEKTTVTVDLVPLGQKFDRTSALLTSNRFLQKKVPINSSIFGDYNVIYVHYPGLPSLVPSVPGSLGPISSSQYPFSANVHNRRHQKINSKSVAIIALSAVVLVLMSFGICIIWKYKGFEKSRGTGRVSNSSATRKTGMRSSFSSMTSSTASFVSTIATCPPTVKTFSISELEKATENFSFNKIIGEGGYGRVYRGTIDDEVDVAVKLLTRKHQNRDREFIAEVEMLSRLHHRNLVKLIGICIERSTRCLVFELVPNGSVESHLHGSDKIYGPLDFDTRMKIALGAARGLAYLHEDANPHVIHRDFKASNVLLENDFTPKVADFGLAKEASEGMDHISTQVMGTFGYVAPEYAMTGHLLVKSDVYSYGVVLLELLSGRKPVDMTQPPGSENLVTWARPLLTDRDGLQQLVDPSMPAASYGFEKLAKAAAIASMCVHVEASHRPFMGEVVQALKLIYNGNNDDTCTSGSFGGGGGEEYEDEEASSPWNNRSWSHDFAATPPPASRRLAFPRAPARPTTMDYSSDPADGAAGTSSASARRQRSTSSLVLDKIESLAAYDWSGPLRASRGRNFYRLRGSMSEHGGHPSEDCSMEGYWM

SEQ ID NO: 45 - DNA, 1257 bp, Saccharum officinarum
atgacggacggcggcgacgagtacaagcgcgaggagtcggtgaccctgctggtcatcgtctccctcgccgcgctctcgctcctctccctcatcgcggccttcgcctactactgctacattacgcgcaaggtctcccgccgcctccactcgctccatctccccaagcgttccagctcccctcctccgcctcctccccgggccccgccgcggcagcagcaggggaaggacagcccgtccagcaactccgccagcgacgggggtggggcggcggcggcgatgtcggtggtggttgctggggagaggggcgtgcaggtgttcagctaccggcagctccacgcggccacgggcgggttcggtcgggcgcacatggttgggcagggcagcttcggcgccgtgtaccgcggggtgctccccgacgggaggaaggtcgcggtcaagctcatggaccgcccagggaagcagggcgaagaggagttcgagatggaggtggagttgctgagtaggctccgatcgccgtatttattgggcctgattggccattgttcggaaggtggacaccgtctactggtatatgagttcatggccaatgggggtctccaggagcatctctatccaaacagaggttcctgtggtggaatctcaaaattggactgggacacaagaatgagaattgcacttgaagcagccaaaggtttggaatatcttcatgagcgtgttaatccacctgttatacatagagacttcaagagtagcaatattctcctggacaaggacttccatgcaagagtttcagactttggtctaaccaaacttggatctgatagagctggtggtcatgtctcaactcgagttttgggcacacaaggctatgttgcaccagaatacgcattgactgggcatttgactaccaaatcagatgtgtacagttacggtgttgtgcttttggaactgcttactggcagagtaccagttgatatgaagaggcctcctggagaaggtgttttagttaactgggcattgcctatgctcactgaccgagaaaaagtcgtgcggatcttggatccagcattggaaggtcaatattccttgaaagatgctgtccaagtggctgctattgctgccatgtgtgttcaaccagaggctgactataggccattaatggctgatgttgtccaatcgctggttccacttgtcaagaaccgttctaatcagaaagcttgcaaccccaatgtgcaatcatcgaagccactcgactag

SEQ ID NO: 46 - protein, 418 aa, Saccharum officinarum
MTDGGDEYKREESVTLLVIVSLAALSLLSLIAAFAYYCYITRKVSRRLHSLHLPKRSSSPPPPPPRAPPRQQQGKDSPSSNSASDGGGAAAAMSVVVAGERGVQVFSYRQLHAATGGFGRAHMVGQGSFGAVYRGVLPDGRKVAVKLMDRPGKQGEEEFEMEVELLSRLRSPYLLGLIGHCSEGGHRLLVYEFMANGGLQEHLYPNRGSCGGISKLDWDTRMRIALEAAKGLEYLHERVNPPVIHRDFKSSNILLDKDFHARVSDFGLTKLGSDRAGGHVSTRVLGTQGYVAPEYALTGHLTTKSDVYSYGVVLLELLTGRVPVDMKRPPGEGVLVNWALPMLTDREKVVRILDPALEGQYSLKDAVQVAAIAAMCVQPEADYRPLMADVVQSLVPLVKNRSNQKACNPNVQSSKPLD

SEQ ID NO: 47 - DNA, 921 bp, Glycine max
agcaagtcaaatgtcattggccatggtggatttggacttgtttaccggggagtgctcaacgatggcaggaaagttgcaatcaaattcatggatcaggcaggaaagcaaggagaagaagaatttaaagtagaggtggaactgctaagtcggttgcattctccatatctgctggcattgcttgggtactgctctgatagtaatcataaattgttggtgtatgaatttatggcaaatggtggactgcaggaacatctctatcctgtcagcaattctattattacgcctgtaaaattggattgggaaacacgactaagaatagcacttgaagctgctaagggtttggaatatcttcatgagcatgtcagtcccccagtgattcacagagattttaagagtagcaacatcctcttggacaagaaatttcatgccaaggtttctgattttggattggcgaagcttggacctgatagagctggtggacatgtttcaactcgggttttgggcacccagggatatgttgcccctgaatatgcactaacagggcatttaacaacaaaatcagatgtgtacagttatggtgttgtacttttggagctgctcactggccgggtgcctgttgatatgaagagacctccaggggaaggtgttcttgtttcttgggctctgccccttttgactgatagagaaaaggttgtaaagattatggatccttcattggagggacaatactctatgaaagaggttgtccaggtggctgcaattgctgcaatgtgtgtgcaaccagaggcagattatcggcctctcatggctgatgttgtgcagtcattggttccactggtgaagactcaaaggtccccttcaaaggtaggaagctcctctagtttcaattcccctaagttgtcccctggcccaacattttaa

SEQ ID NO: 48 - protein, 306 aa, Glycine max
SKSNVIGHGGFGLVYRGVLNDGRKVAIKFMDQAGKQGEEEFKVEVELLSRLHSPYLLALLGYCSDSNHKLLVYEFMANGGLQEHLYPVSNSIITPVKLDWETRLRIALEAAKGLEYLHEHVSPPVIHRDFKSSNILLDKKFHAKVSDFGLAKLGPDRAGGHVSTRVLGTQGYVAPEYALTGHLTTKSDVYSYGVVLLELLTGRVPVDMKRPPGEGVLVSWALPLLTDREKVVKIMDPSLEGQYSMKEVVQVAAIAAMCVQPEADYRPLMADVVQSLVPLVKTQRSPSKVGSSSSFNSPKLSPGPTF

SEQ ID NO: 49 - DNA, 1140 bp, Solanum tuberosum
acagggtgaggaagaattcaaagtggaggtggagttgctatgccgcttgcgctcaccgtatttgctgtcattgattggctattgttcagaaagcagccataaattgcttgtttatgagttcatggcaaatggtggtttacaggagcacttgtatccaattaaaggttccaataattgttgtccgaagttggactggaagacccggttaagaatagctttggaggctgctaaaggtttggaatatctacatgagcatgtcaatcccccaattatacatagagacctcaaaagtagcaatattcttttggacaaaaacttccatgccaaagtttctgactttggattggccaagcttggatctgataaagctggtggccatgtctctacccgcgttttggggacacagggatatgttgctccagaatatgcattaacaggacacttgaccaccaaatcagatgtttacagttatggggttgtcctcctagagttgttgactggcagagttccagttgatatgaagagatcacctggcgaaggtgttcttgtttcttgggcattgccccgtctcactgatagggaaaaagtcgtagagataatggatccagctctggagggtcagtattcaatgaaagaagttattcaagtagctgctattgctgcaatgtgtgtacagcccgaggctgattacaggccactgatggcagacgttgtgcagtcgttggttccactggtgaaacaaccgcgaccaactgtgaagcctggtagctcgtctagctttcacgccacacagtccccctccccccatgttacacaatctcctaaggcttagacttttttcaagcgaaatgggcatatcatatctcttgatccttaattctagtccaacttctataactagtggccatttagtttgtgtttggactatctagcttatggaaccccctttcatttagtaactttaatctaacaaattttgatggagcaagccagctgatgtaatattttctcatgctaaactaggtggagcaaaaacagtttctctgtatgtaacatgtcaaagctcccatctaatatggggattgtatttgagtattcttggttagaagcagattcaagatttgaagttactatatgata

SEQ ID NO: 50 - protein, 276 aa, Solanum tuberosum
QGEEEFKVEVELLCRLRSPYLLSLIGYCSESSHKLLVYEFMANGGLQEHLYPIKGSNNCCPKLDWKTRLRIALEAAKGLEYLHEHVNPPIIHRDLKSSNILLDKNFHAKVSDFGLAKLGSDKAGGHVSTRVLGTQGYVAPEYALTGHLTTKSDVYSYGVVLLELLTGRVPVDMKRSPGEGVLVSWALPRLTDREKVVEIMDPALEGQYSMKEVIQVAAIAAMCVQPEADYRPLMADVVQSLVPLVKQPRPTVKPGSSSSFHATQSPSPHVTQSPKA

SEQ ID NO: 51 - DNA, 1995 bp, Nicotiana tabacum
taagataccacagctatgctgacttatgaaagattttggaaaaagaaggtgcctctcaatagaacgatgtttggggattatgaagtgatgcacattatctatccagggctgccttcttctcctccatctggcattgattctggtaatggtccaactggaagtgctgtcaatcaacaattccctattactgctgattttgtaaacaagagtcagagaatgagtccccgagtcatttttctcattgcttcatcagcattagtactgttggtggtatgctgtggtgcactagttgtcctcttaaaatgcaggaggactggccgaccgtcaaatgctgttggtccagtgtttacaccatctatgcacaagagatctggtaagggaattgggtcgacaatatcaagtagcccgactagttcaacatcgatttccctcatttctgctatgcctgcttctatcctttctgtcaaaacatttacgcttgcggagcttgagagggcaactgacaagtttagtttaaaaagggttttaggtgaaggaggatttggacgtgtttatcatggtatcttagaagacagaacagaagttgccgtgaaagtactgactagggataaccaaaatggagatcgtgaattcattgctgaagttgagatgctaagccgattgcatcaccgtaacctggtgaaattaattggtatatgcagtgaagagcggactcgcagcttggtatatgaacttgttcggaacggtagtgtggagtctcatttgcatggaagagacgggagaaaagagccacttgattgggatgtgaggttgaaaattgctcttggtgctgcgagaggactagcttaccttcatgaagattctaatcctcgtgtaattcatcgtgattttaaagccagcaatgttttgttagaagatgacttcacgcccaaggttgcagattttgggttagcaagggaagcaaccgaaggaagtcaccacatatctacaagagtcatgggaacttttgggtatgttgctcctgaatatgcaatgacgggacacctacttgttaaaagtgatgtgtatagttatggagttgtattattggagcttctctccggaagaaaacctgtggacatgtctcaacctcctggagaagaaaacctggtaacttgggcgcgacctcttctgaccactagagaaggtttggagcaacttgtggatccttctttggctggaagctatgactttgatgatatggcaaaggtggctgccattgcttcaatgtgcgttcacccggaggtgactcaaaggccatttatgggagaagtggtgcaagctctcaaactaatttataatgacaatgatgaaacttgtgctgatggatgtagccagaaggagtcttctctgccagattcagatttcaaaggtgtcccttccgatagcagttggtggaatgctggtggggttacaccaagattaacatatggacaagcctccactttcatgaccatggattacagttctggtccgcttgaagagttcgaaaacagaccgttttcagcttcaagttttaatcttggtggaggggcgggtttaacaataagccacggtaacagatcaggtcctttgaggactgtaaggagtaaacctgctctctataggttaaggggcagtatgagtgaacacggtgcacttcttccaagacatgattggagggatggcaccaattatgatgcttctttttagagtgatttgtcaaatgtacagtgccgaaggccgtttctatttgggaaaaaagatggttctccggtgtagattaggagtttgaaattgccgctgtatccctgagagagtggactaagccttctaattttggtaatcttacattcattttaatagacaggaaagataaacaggacactccttgttgtatatgttgtcaaattaactttttctttagtccaatattggattggactactagtctttctaaaaaaaaaaaaaaaaaaa

SEQ ID NO: 52 - protein, 571 aa, Nicotiana tabacum
MLTYERFWKKKVPLNRTMFGDYEVMHIIYPGLPSSPPSGIDSGNGPTGSAVNQQFPITADFVNKSQRMSPRVIFLIASSALVLLVVCCGALVVLLKCRRTGRPSNAVGPVFTPSMHKRSGKGIGSTISSSPTSSTSISLISAMPASILSVKTFTLAELERATDKFSLKRVLGEGGFGRVYHGILEDRTEVAVKVLTRDNQNGDREFIAEVEMLSRLHHRNLVKLIGICSEERTRSLVYELVRNGSVESHLHGRDGRKEPLDWDVRLKIALGAARGLAYLHEDSNPRVIHRDFKASNVLLEDDFTPKVADFGLAREATEGSHHISTRVMGTFGYVAPEYAMTGHLLVKSDVYSYGVVLLELLSGRKPVDMSQPPGEENLVTWARPLLTTREGLEQLVDPSLAGSYDFDDMAKVAAIASMCVHPEVTQRPFMGEVVQALKLIYNDNDETCADGCSQKESSLPDSDFKGVPSDSSWWNAGGVTPRLTYGQASTFMTMDYSSGPLEEFENRPFSASSFNLGGGAGLTISHGNRSGPLRTVRSKPALYRLRGSMSEHGALLPRHDWRDGTNYDASF

SEQ ID NO: 53 - DNA, 1059 bp, Medicago truncatula
atgttaagtcgtttgcatcatcgcaatctagtgaaacttatcggtatatgcattgaagggcgcaggcgttgtctggtatacgagcttgttcctaatggcagtgttgagtcccatctgcatggtgatgacaagaataggggacctctagattgggaagcacgtatgaaaattgcccttggagctgcgagaggattggcgtatcttcacgaggattccaatccccgtgtaattcatcgagacttcaaagctagcaatgtgttattagaagacgactttacccctaaggtttctgatttcggtttagcaagagaagcaactgaggggagtaatcatatttctacacgggtgatggggacttttgggtacgttgccccagaatatgcaatgacgggccatttactggttaaaagtgatgtttatagttacggtgttgtgcttcttgaacttctcacaggcagaaaaccagtggatatgtctcaacctcagggacaggagaatcttgttacctgggcacgggcactgttgactagtagagaaggtttagagcagctagtggatccatctttggctggaggttacaactttgatgacatggcaaaggtagcagctattgcgtcaatgtgtgttcactccgaggtgacacagagaccttttatgggagaagttgtgcaggctcttaaattaatatacaatgacacagacgagactggtggagattattgtagtcagaaggactcctctgctcaggagtctgatttcagaggtgagcttgccccttctgatagcagttggtggaatggtggaggtttaactcctcgattaacttatggacaagcatcttcctttatcacaatggagtacagttctggtccacttgaagatatggaaaacagaccgttttcaacttcaagctttaatggagatgagctatctttaccaattaggcatgggaataggtcaggtcccttaagaacgacccgaagcaagttatccttatatagattttcaggaagtcggagtgagcatggggaagtttcgtctaagcgaaattggatttga

SEQ ID NO: 54 - protein, 352 aa, Medicago truncatula
MLSRLHHRNLVKLIGICIEGRRRCLVYELVPNGSVESHLHGDDKNRGPLDWEARMKIALGAARGLAYLHEDSNPRVIHRDFKASNVLLEDDFTPKVSDFGLAREATEGSNHISTRVMGTFGYVAPEYAMTGHLLVKSDVYSYGVVLLELLTGRKPVDMSQPQGQENLVTWARALLTSREGLEQLVDPSLAGGYNFDDMAKVAAIASMCVHSEVTQRPFMGEVVQALKLIYNDTDETGGDYCSQKDSSAQESDFRGELAPSDSSWWNGGGLTPRLTYGQASSFITMEYSSGPLEDMENRPFSTSSFNGDELSLPIRHGNRSGPLRTTRSKLSLYRFSGSRSEHGEVSSKRNWI

SEQ ID NO: 55 - DNA, 983 bp, Populus sp.
atgggccataagcctccagacaaatacaaaggagtccaggttttcacatacaaggagcttgaaatcgccacaaacaaattcagtgaagcaaatgtgacatggaatgaagggtatggagtggtgtatggaggtaccctaagtgatggaactgtggcagcaattaagatgctccatagagcagggaagcaaggagagcgtgcatttaggatagaggtggatttgctaagcaggttgcactcaccatacttggtggagctacttggttattgtgctgaccagaaccacaggctcctagtatttgaatttatgcctaatgggactcttcaacaccatctccatcacaagcaatatcgaccgttggattgggggacacgattgagaattgcccttgattgtgctagggccctggagttccttcatgagctcacaatcccagcagtaatccatcgtgacttcaagtgtagtaacatcttactagaccaaaattttcgggctaaggtttcagatttcggatcggctaagatgggctcggaaaggatcaatgctcgaaattcgatgtgtttgccgagtaccactggttatctagcaccagagcatgcttcaacaggtaagctcaccacaaaatcagatgtatacagctatggagttgttcttttacagctcttaactggtcgtaaacctgttgataccaagcagccctctggtgaacatgtccttgtctcctgggctcttccaaggctaaccaacagagataaggtagtggaaatggttgatccagccatgcaagaccagtattcaaagaaggacttgatccaggtggctgctattgcagctgtgtgtgtgcaaccagaagcagattataggcctctcatgacagatgttgtgcagtctctaatccctctggtcaagaacctctcttctgtatcttcctcttgttcctctaaatttatgaatcagatgctgtgcagtccaaggcctatgta

SEQ ID NO: 56 - protein, 327 aa, Populus sp.
MGHKPPDKYKGVQVFTYKELEIATNKFSEANVTWNEGYGVVYGGTLSDGTVAAIKMLHRAGKQGERAFRIEVDLLSRLHSPYLVELLGYCADQNHRLLVFEFMPNGTLQHHLHHKQYRPLDWGTRLRIALDCARALEFLHELTIPAVIHRDFKCSNILLDQNFRAKVSDFGSAKMGSERINARNSMCLPSTTGYLAPEHASTGKLTTKSDVYSYGVVLLQLLTGRKPVDTKQPSGEHVLVSWALPRLTNRDKVVEMVDPAMQDQYSKKDLIQVAAIAAVCVQPEADYRPLMTDVVQSLIPLVKNLSSVSSSCSSKFMNQMLCSPRPM

SEQ ID NO: 57 - protein, 282 aa, Arabidopsis thaliana
  UNSURE (75)..(75): Xaa can be any naturally occurring amino acid
  UNSURE (121)..(121): Xaa can be any naturally occurring amino acid
FSEEKKIGNGDVYKGVLSDGTVAAIKKLHMFNDNASNQKHEERSFRLEVDLLSRLQCPYLVELLGYCADQNHRIXIYEFMPNGTVEHHLHDHNFKNLKDRPQPLDWGARLRIALDCARALXFLHENTISTVIHRNFKCTNILLDQNNRAKVSDFGLAKTGSDKLNGEISTRVIGTTGYLAPEYASTGKLTTKSDVYSYGIVLLQLLTGRTPIDSRRPRGQDVLVSWALPRLTNREKISEMVDPTMKGQYSQKDLIQVAAIAAVCVQPEASYRPLMTDVVHSL

SEQ ID NO: 58 - DNA, 2194 bp, Oryza sativa
aatccgaaaagtttctgcaccgttttcaccccctaactaacaatatagggaacgtgtgctaaatataaaatgagaccttatatatgtagcgctgataactagaactatgcaagaaaaactcatccacctactttagtggcaatcgggctaaataaaaaagagtcgctacactagtttcgttttccttagtaattaagtgggaaaatgaaatcattattgcttagaatatacgttcacatctctgtcatgaagttaaattattcgaggtagccataattgtcatcaaactcttcttgaataaaaaaatctttctagctgaactcaatgggtaaagagagagattttttttaaaaaaatagaatgaagatattctgaacgtattggcaaagatttaaacatataattatataattttatagtttgtgcattcgtcatatcgcacatcattaaggacatgtcttactccatcccaatttttatttagtaattaaagacaattgacttatttttattatttatcttttttcgattagatgcaaggtacttacgcacacactttgtgctcatgtgcatgtgtgagtgcacctcctcaatacacgttcaactagcaacacatctctaatatcactcgcctatttaatacatttaggtagcaatatctgaattcaagcactccaccatcaccagaccacttttaataatatctaaaatacaaaaaataattttacagaatagcatgaaaagtatgaaacgaactatttaggtttttcacatacaaaaaaaaaaagaattttgctcgtgcgcgagcgccaatctcccatattgggcacacaggcaacaacagagtggctgcccacagaacaacccacaaaaaacgatgatctaacggaggacagcaagtccgcaacaaccttttaacagcaggctttgcggccaggagagaggaggagaggcaaagaaaaccaagcatcctccttctcccatctataaattcctccccccttttcccctctctatataggaggcatccaagccaagaagagggagagcaccaaggacacgcgactagcagaagccgagcgaccgccttctcgatccatatcttccggtcgagttcttggtcgatctcttccctcctccacctcctcctcacagggtatgtgcctcccttcggttgttcttggatttattgttctaggttgtgtagtacgggcgttgatgttaggaaaggggatctgtatctgtgatgattcctgttcttggatttgggatagaggggttcttgatgttgcatgttatcggttcggtttgattagtagtatggttttcaatcgtctggagagctctatggaaatgaaatggtttagggatcggaatcttgcgattttgtgagtaccttttgtttgaggtaaaatcagagcaccggtgattttgcttggtgtaataaagtacggttgtttggtcctcgattctggtagtgatgcttctcgatttgacgaagctatcctttgtttattccctattgaacaaaaataatccaactttgaagacggtcccgttgatgagattgaatgattgattcttaagcctgtccaaaatttcgcagctggcttgtttagatacagtagtccccatcacgaaattcatggaaacagttataatcctcaggaacaggggattccctgttcttccgatttgctttagtcccagaattttttttcccaaatatcttaaaaagtcactttctggttcagttcaatgaattgattgctacaaataatgcttttatagcgttatcctagctgtagttcagttaataggtaatacccctatagtttagtcaggagaagaacttatccgatttctgatctccatttttaattatatgaaatgaactgtagcataagcagtattcatttggattattttttttattagctctcaccccttcattattctgagctgaaagtctggcatgaactgtcctcaattttgttttcaaattcacatcgattatctatgcattatcctcttgtatctacctgtagaagtttctttttggttattccttgactgcttgattacagaaagaaatttatgaagctgtaatcgggatagttatactgcttgttcttatgattcatttcctttgtgcagttcttggtgtagcttgccactttcaccagcaaagttc

SEQ ID NO: 59 - DNA, 1620 bp, Arabidopsis thaliana
atggaatttgagtgccaagagagacttgaagctgcgaacgatcaaagaagtgagtctggtcttttgaataccgatttgagaataggtaatgatgggtctgttgagattccaaatgtgaagttgtgttgtcagaaaaagaagggaactttagtgcccagtggctcgaaacagttactctctgacaaggatttgtctactaccattattgatttacctcaggcattgatatctgagattcttaattgccttgacccaaaagagttgggtctagtgtcttgtgtttcaacttatctgcataggttagcatctgagcatcacgcttggaaggagttctatcgtgagagatggggactccctgtagttttcggagctgcaagttcagggctttctgatgagagatcatggaaagatctgtttgttgaaagggaatttaggagtaggacctttttaggacgttatagtattgatactctgtatggtcacactgaagcagtccggactgtttttctcttagcttctgccaagctcgttttcacttctggatatgattccattgttcggatgtgggacatggaagaaggcttgtctattgcggcatctaaacctctcggttgtacgattagggcacttgctgctgatacaaagctgttggtagctggcggtactgatggattcattcattgctggaaatcactggatggtctccggaacctgtttgatctcacaggttttcagaaagagaagactgagtttcggctatggggacatgagggtcctattacatctcttgccctggacatgacaagtatctttagcggttcatgggatatgtctgttcgtatatgggatcgatcttcaatgaagtgtgtcaaaaccttgaggcatagtgattgggtttggggacttgcacctcatgaaaccaccctcgctagcacgtcaggttctgatgtatatatttgggacgttagcagtgagactccattggcgatcatccctgatgctcatgagggtaccacttactctttggcaagaagccatactggggatttcctgtttactggtggagaagatggagggattaaaatgtttgagatcagaagatacggtagtgaaacaagcgttgtacttatatctcaatggatgcctcacactagtcctgtctactctctttcttttgagtttccttggcttgtctcagcatccggtgacggtaaactcgcacttatcgacgttaggaaactgttaaaaactaaccgttgtgcctattccaaaaggatttcttcgagtactgtggaaccgccacaacgaatgctgcacgggttcgggtcaaacttgttctctgtggacgtgggttatgaccgtatagtgtgtggaggtgaagaaggcacagtccggatatggaacttcacacaagcattggagatagagcgaaggacccgagctctgaaaggaatgaggcatgagaataggatgagacgaaggagaatgcaaatggagatgaacgcaaagaatggaaggcctgaccaatgctccattgctgctcataagaaccccatcaatggagaaaggaaccgagcctggcatagtaaacgaagagcaagcgggaaggcgaaggcctaa

SEQ ID NO: 60 - protein, 539 aa, Arabidopsis thaliana
MEFECQERLEAANDQRSESGLLNTDLRIGNDGSVEIPNVKLCCQKKKGTLVPSGSKQLLSDKDLSTTIIDLPQALISEILNCLDPKELGLVSCVSTYLHRLASEHHAWKEFYRERWGLPVVFGAASSGLSDERSWKDLFVEREFRSRTFLGRYSIDTLYGHTEAVRTVFLLASAKLVFTSGYDSIVRMWDMEEGLSIAASKPLGCTIRALAADTKLLVAGGTDGFIHCWKSLDGLRNLFDLTGFQKEKTEFRLWGHEGPITSLALDMTSIFSGSWDMSVRIWDRSSMKCVKTLRHSDWVWGLAPHETTLASTSGSDVYIWDVSSETPLAIIPDAHEGTTYSLARSHTGDFLFTGGEDGGIKMFEIRRYGSETSVVLISQWMPHTSPVYSLSFEFPWLVSASGDGKLALIDVRKLLKTNRCAYSKRISSSTVEPPQRMLHGFGSNLFSVDVGYDRIVCGGEEGTVRIWNFTQALEIERRTRALKGMRHENRMRRRRMQMEMNAKNGRPDQCSIAAHKNPINGERNRAWHSKRRASGKAKA

SEQ ID NO: 61 - DNA, 1689 bp, Oryza sativa
atggactttgattgcaaaacagcaagaggagactcttcatctgtgaatcgttcatgcattgtcactgaaggcactgtcgtccaggcaaagcccgtttctcacaacgggaaagctaaacactggaatagcctcagtacattgaataaccagaagtgcagttatgaattactttccgacccaaagaaaaatgttgaaacaagtgatggtgagaccgcctcaaagtgtgactcatggtgcttcactgatttgccatccgcattggtctgtgaagtgcttgaacacctcgatccaaaggaacttggcattgtatcttgcgtctccaccctactgcataccctagccacagatcatcaggggtggaagaagttctactgtgaaaggtgggggattcctactcctccagtcaccctcaatgggcccttggttccaggaggaacttcagattggaagtcttggaaaacattatttgtggagcgggagtttcgaagtaaatcattcatgggaagattcagtgtggatgttctccgtgaccacagtgaggatgtacgcactgtgttccttctagcatcagtaaatctgatatttactggtggtaatgactctgtgatccgaatgtgggacttggaggaagggcttttgattgataagtcccgcccactttgttgcaccatccgggccattgcagctgacactaggcttttggtcactgcaggaaccaatgcctttattcattgttggagggctgttgaaggtaattcttaccctttccacatctctgggaatggcactgaccagagtcctgagtttcgcctttgggggcatgaaggacctgtgacttgtcttgccttggattcattgaggattttcagtggtagctgggatatgactgtccgtgtttgggacagatccgaaatgaaatgtgttcagaagttcatgcatgcagattgggtttggagcgtggcacctcatggaaatactgttgccagtacagctggtagggatgcctatgtatgggatatcaggagtggtgagttggaaaatgttatttccaatgcccattatggtaatgcattttctttagctcgaacacacctagctgatgtgctgtttaccggaggagaggatggggcaattcgcctgttcaatgtttctgaggtctctgatgatgaagatattaagccagctgctacttgggttccacataccggccctgttcattccctcgcttttgagtatccatggcttgtctcagcctctagtgatggcagggttgcactgattgatttgaggaagcttctgaccccaagaaagtcatcaaaacaaccattcagggttaagaactttgatccaagttccattgaacctccacagagaatgcttcatggctttgggtgcgatcttttttctgtcgccattggtgcagacaggattgtctgtggaggcgaggatggcgctgtcaaagtctggaacttctcagaagcactggagattgagaagagggcacaagctctaagaagtatgaggcaggagaaccgcatgaggcgaaaaaaggcacaagtagagatgaatgcaaatggtagaaggtctgaccaatgtggctcaatagccatgaaaagaaaccaactgaagggtgataagagtgtcacttggcacagcaagcgtgccatcaatgataaggtcaagtcttag

SEQ ID NO: 62 - protein, 562 aa, Oryza sativa
MDFDCKTARGDSSSVNRSCIVTEGTVVQAKPVSHNGKAKHWNSLSTLNNQKCSYELLSDPKKNVETSDGETASKCDSWCFTDLPSALVCEVLEHLDPKELGIVSCVSTLLHTLATDHQGWKKFYCERWGIPTPPVTLNGPLVPGGTSDWKSWKTLFVEREFRSKSFMGRFSVDVLRDHSEDVRTVFLLASVNLIFTGGNDSVIRMWDLEEGLLIDKSRPLCCTIRAIAADTRLLVTAGTNAFIHCWRAVEGNSYPFHISGNGTDQSPEFRLWGHEGPVTCLALDSLRIFSGSWDMTVRVWDRSEMKCVQKFMHADWVWSVAPHGNTVASTAGRDAYVWDIRSGELENVISNAHYGNAFSLARTHLADVLFTGGEDGAIRLFNVSEVSDDEDIKPAATWVPHTGPVHSLAFEYPWLVSASSDGRVALIDLRKLLTPRKSSKQPFRVKNFDPSSIEPPQRMLHGFGCDLFSVAIGADRIVCGGEDGAVKVWNFSEALEIEKRAQALRSMRQENRMRRKKAQVEMNANGRRSDQCGSIAMKRNQLKGDKSVTWHSKRAINDKVKS

SEQ ID NO: 63 - DNA, 1728 bp, Medicago trunculata
atggcatttgattgtccacagagtattaaggtttctcaaaatttggtagaaaatccaggtataagcatagacatagttgaattgaatccaaaacccaattccaaagcaatttcaatttcattccctgattttgttacaaataccaaatctgaatctggaaaaggtgagatttttaaggggaaatccaagctgaattctaagaaaggaatcaaagcagcctctgctggtgctttgaatcaatcatcagttcctggtgatgtggttattggtaattgtaggtcaattaccgacctgcctccggtgttgatatctgagattctgaattgtcttgatcccaaagaacttggaattgtttcatgtgtgtcgttgattctgcgtagtcttgcttctgagcatcatgcttggaaggaattctattgtgaaaggtgggggcttccagcagttcctgaggctgtcctggattcggattctggggttggggattcggttaaggatgaaaagtcatggaaggatattttcgtggaaagagattataggagtaagacttttatgggaaggtatagtatggatgtgttgtatggacatactgaggcggttcggactgttttcttgttggcttctacaaagcttatatttacatctgggtatgacactgttgtgaggatgtggaacatggaaagtgggttgtcggttgcatcgtctaaaccacttggctgcaccattcgtgcggttgcagctgatacaaggctgctagttgctggtggtactgatgggttcattcattgttggagggctgttgaaggtttgccacatctgtttgagcttagaaactcacaacaaaataagaatgaggttcgactttggggtcatgatggtccggttacttcacttgctttagatttgacaaggatttatagcggctcttgggacacgactgttcgtgtttgggaccgtcactcgatgaaatgcactgtcgtgttgaggcatagtgactgggtttggggacttgtccctcatgatactacagttgtcagcacatcaggttcaaatgtctatgtttgggatacaaatagtggtaatttggcaactgttgttctaaatgctcatgttggtaatacttatgctctggcaagaagccatactggggatttcatttttactgggggtgaagatggttcaattcacatgtacgagattgttgacggtagttatgtgaccgaagctctgcatgttgctacatgggatccccactctggtcctgtgtattcccttgcctttgagtttccttggcttgtttctgcatcaagtgacggcaaattggctctaattgacgtgaggaagctgctgcgcaggagcaagcgtgccattggaaagagagctacgaaggcaaagtattcgggcgaagttaatgtagagcctccacagaggatgttgcatggatttaagagtaatcttttctctgtaggtataggagctgatcgaattgtttgcggaggtgaagaaggtgtcgttaggatttggaatttcacagaagctttggaaattgaaagcagagttcgtgcattgagaggaatgcgattagagaacagaatgagacgacgtaagaaccaaacagagctcaacagtaaaggcggtaagagtgatcaatgttcagctgcggccaagaagagttcagtgacttgtatttggccgagtaaacgtgggatgggtggaaagacgaaggcatag

SEQ ID NO: 64 - protein, 575 aa, Medicago trunculata
MAFDCPQSIKVSQNLVENPGISIDIVELNPKPNSKAISISFPDFVTNTKSESGKGEIFKGKSKLNSKKGIKAASAGALNQSSVPGDVVIGNCRSITDLPPVLISEILNCLDPKELGIVSCVSLILRSLASEHHAWKEFYCERWGLPAVPEAVLDSDSGVGDSVKDEKSWKDIFVERDYRSKTFMGRYSMDVLYGHTEAVRTVFLLASTKLIFTSGYDTVVRMWNMESGLSVASSKPLGCTIRAVAADTRLLVAGGTDGFIHCWRAVEGLPHLFELRNSQQNKNEVRLWGHDGPVTSLALDLTRIYSGSWDTTVRVWDRHSMKCTVVLRHSDWVWGLVPHDTTVVSTSGSNVYVWDTNSGNLATVVLNAHVGNTYALARSHTGDFIFTGGEDGSIHMYEIVDGSYVTEALHVATWDPHSGPVYSLAFEFPWLVSASSDGKLALIDVRKLLRRSKRAIGKRATKAKYSGEVNVEPPQRMLHGFKSNLFSVGIGADRIVCGGEEGVVRIWNFTEALEIESRVRALRGMRLENRMRRRKNQTELNSKGGKSDQCSAAAKKSSVTCIWPSKRGMGGKTKA

SEQ ID NO: 65 - DNA, 1683 bp, Triticum aestivum
atggactttgattgcaataaggcaggagagtcttcagccaagcattgttctagcatttgcaacgagggcacactcatccaggcaaacaccttaattcattgtggaaaggctaaaaagtggaatagcctcaacaaattcaacaacccggagtcaagtcatggatcacttccaagggttaatgaccccaaggaagatggtgaaacaggaaatgatgcaactgcctctgagtgtagcgttatgtgcttcactgatctgccgtctgcattggtctgtgaagtccttgcgcgccttgatccaaaggggcttggggttgtatcttgtgtctccacagttctgcagaccctagccacagatcatcagggatggaagaaattctactgtgagaggtggggacttccaaatgctcccatcggacccctagttccaggtggaaccccagatgggaggtcgtggaaagcattgtttgtggaccgggagtttcaaagcagatcattcatgggaagatttagtgtggatgttctccgtggtcacaatgaggatgtacgcactgtgtaccttctggcatcagcaaatctgatattcactggtggccatgattctgtggttcggatgtggaatatggaggaagggctactaattgatgagtcccgcccatttggttgcactatccgggcaattgcagctgacagtaggcttttggtaactggaggatccaaagccttcattcagtgttggagggctattgagggggcctcgcacctttctcacatttctgggaatggtactaaccagaattctgaatttcgcctatgggggcatgaagggcctgtgacttgtctttccttggattcaacaaggatttacagtggttcttgggatatgactgttcgtgtttgggacagagccgagatgaagtgtgtgcaaaagttcatgcatgctgactgggttttggccctggctcctcatggaaatactgttgccagtacagctggtagagacgcatatgtgtgggatatcggaagtggcgagttaacaactataatttccaatgcccatgttggtaatgcatattctgtagctcgaacacacctggcaggtgtgctgtttactggaggagaggacggggcaattcgcttgttcgatgtttctgagatatcggatgatgagaatattaaaccagctgccacttggttgccgcattctggccctgttcattctcttgcttttgagtacccatggcttgtttctgcctctagtgatggcaggattgcactaattgatttgaggaagatcctgacccccctaaactcatcaaagcgccgtttcagggttaagccctttgatccaagtaccgtagagcctccacagcgaatgcttcatggctttggatgctatcttttctccgtcggcatcggtgcagatagaatcatatgtggaggcgaggatggctctgtcagggtctggaacttctcggaagcactggagattgagaagaaggcacaggctttaaggagtctgagacaggagaaccgcatgaggcggaggaaggcgcaagtggagatgaatgcaaatggtagaagggttgaccattgctcagtagccatgaaaaggaacccattgaagggtgataagagtgtcacttggcaaatcaagcgtcccatcagtgacaaggtcaagtcttag

SEQ ID NO: 66 - protein, 560 aa, Triticum aestivum
MDFDCNKAGESSAKHCSSICNEGTLIQANTLIHCGKAKKWNSLNKFNNPESSHGSLPRVNDPKEDGETGNDATASECSVMCFTDLPSALVCEVLARLDPKGLGVVSCVSTVLQTLATDHQGWKKFYCERWGLPNAPIGPLVPGGTPDGRSWKALFVDREFQSRSFMGRFSVDVLRGHNEDVRTVYLLASANLIFTGGHDSVVRMWNMEEGLLIDESRPFGCTIRAIAADSRLLVTGGSKAFIQCWRAIEGASHLSHISGNGTNQNSEFRLWGHEGPVTCLSLDSTRIYSGSWDMTVRVWDRAEMKCVQKFMHADWVLALAPHGNTVASTAGRDAYVWDIGSGELTTIISNAHVGNAYSVARTHLAGVLFTGGEDGAIRLFDVSEISDDENIKPAATWLPHSGPVHSLAFEYPWLVSASSDGRIALIDLRKILTPLNSSKRRFRVKPFDPSTVEPPQRMLHGFGCYLFSVGIGADRIICGGEDGSVRVWNFSEALEIEKKAQALRSLRQENRMRRRKAQVEMNANGRRVDHCSVAMKRNPLKGDKSVTWQIKRPISDKVKS

SEQ ID NO: 67 - DNA, 1632 bp, Populus tremuloides
atggcatttgaatgccaaaagagcactgaggtgtcgaaaagtcttgccatttgtgttgaaaaaagtaattccaatacggaacatcttgaaatttcgaagtctcctttagactgttaccctaagaaggggattttaagcagtttgagttcaaaacagctttcttgtaatgatgttttgctcaattgtcgccggtcaattaccgaccttcctccggcattgatttctgagattcttagttgccttgatcctcaagagcttggtatagtttcatgtgtatcgagagtacttaatagtcttgcaaccgagaatagtgtttggaaggaagtatatggtgagagatggggactccctatagttcctgcaccattgggtgcaggggtttcaaatgagaagtcatggaaggaactgtttgtggagagggagtacaggagtaagatttttttgagtcgttatagcattgatactttgcatgggcatactgaagcagttagaacagtttctctattggcttctgccaagctcatttttacctctgggtatgatatgattgtgcgaatgtgggacatggaagacgggttgtatattgcatcatcacggcctcttggttgcactatacgagcagttgcagcggacacgaagctgttggttgctggtggtactgatggttttattcaaggctggagggcagttgagggtctcaagcacttgtttgaccttaaaggttctgaggtgccaaacactgaatttagaatttgggagcatgagggacctataacctctcttgccttggaccccacaaggatttatagtgggtcatgggacatgactgttcgtatatgggatcgttcctcacttgaatgcataaagatcttgaggcatggtgactgggtgtggagccttgttccgcatgatactacagttgctagcacatcaggttcagacgtgtatgtttgggacactaatagtgggactctgctaactgttattcatagtgctcatgtaggtaacacttattctttggctcgaagccatacagaggatttcatttttacaggaggagaagatggggctatgcacatgtttgagatcactggtcctaaacctgaggctaatgtttttaaggttgcaacttggatgcctcactcagggcctgtttattcccttgcatttgagtttccatggcttgtttcagcttctagtgatgggaggctgtcactagttgatgtgagaaaactactaaggaccaacagacgttctctacgaaagaatgtttcaagggttaccgataaggaccgtaacaatgttgaaccacctcagaggatgttacatgggtttgggcccaatttgttttcagtagatgttggtgctgaccgtattgtatgtggaggagaggaaggtgttgttaggatctggaacttctcaaaggcgctggaaagggagcggacagctcgtgccatgagaggaatacggttggagaacaggatgaggcgtcgtagacttcaaatagagatgagcagtaagggtggtaggactgatcaatgctctgttgcagccaagaagaacccaatgcatgtagacaagagtggtgtctggcgcaataaacatgggatgagtggcaagctgaaagcatag

SEQ ID NO: 68 - protein, 543 aa, Populus tremuloides
MAFECQKSTEVSKSLAICVEKSNSNTEHLEISKSPLDCYPKKGILSSLSSKQLSCNDVLLNCRRSITDLPPALISEILSCLDPQELGIVSCVSRVLNSLATENSVWKEVYGERWGLPIVPAPLGAGVSNEKSWKELFVEREYRSKIFLSRYSIDTLHGHTEAVRTVSLLASAKLIFTSGYDMIVRMWDMEDGLYIASSRPLGCTIRAVAADTKLLVAGGTDGFIQGWRAVEGLKHLFDLKGSEVPNTEFRIWEHEGPITSLALDPTRIYSGSWDMTVRIWDRSSLECIKILRHGDWVWSLVPHDTTVASTSGSDVYVWDTNSGTLLTVIHSAHVGNTYSLARSHTEDFIFTGGEDGAMHMFEITGPKPEANVFKVATWMPHSGPVYSLAFEFPWLVSASSDGRLSLVDVRKLLRTNRRSLRKNVSRVTDKDRNNVEPPQRMLHGFGPNLFSVDVGADRIVCGGEEGVVRIWNFSKALERERTARAMRGIRLENRMRRRRLQIEMSSKGGRTDQCSVAAKKNPMHVDKSGVWRNKHGMSGKLKA

SEQ ID NO: 69 - DNA, 1695 bp, Zea mays
atggcctttgactgcaacaaggaaagaggagtttcttcgcctgacagttgctcccgcatttgcaccgagggcactctcgtccaggcaaatcccttatctcactactggaagcctaaacgtttggagaacttcaacaagttggagaaccagaagtccagttatgaatctgctccgagtggctctgatccaaaacaggatgctgaagcgagtgatgaggcaactgcctcactgtgtggcttcaggtgcttcactgatctgccagcttcgttggtctgcgaggtccttgcacgtctcgatgcgaaggaccttggaattgtatcctgtgtctccaccctcctgcacgccttagccacagatcatcagggatggaagaagttatactgcgaaaggtgggggcttccagacctccccaccaccctgaatgggcccttgctgccgggtgtccccctagatgggaagttttggaaaacatttttcgtggagcgggagtttaggagcaaatccttcatgggaagattcaatctggatattctccgtggccacaatgaggatgtgcgtgctgtgtcccttttggtatcagcaaatctgatattcacaggcggccgcgattctgtggttaggatgtggaagatggaggaagggttattgattgatacatcccgtgcacttggtggcaccatccgggcgattgcagctgactcgaggcttttagtgagtggaggaactaatgcctatattcagtgttggagggccgttgaaggcaatggtcaattatttcacatctctggaagtggtaccgaccagaatgcggagtttcgcctctggggtcatgaaggtcctgtgacttgtcttgccctggattcactgaggatttatagtggttcttgggacatgactgttcgtgtttgggacagagaccagatggagtgtgtgcaaaagttcatgcatgcagactgggtttgggatcttgctctgcgtggaaatactgttgccagtactgctggtagagatgcatatgtatgggatatcagggctggcgagttaacaagcttaatttccaatgcccatgttggtagcgcatattcaattgcttggacacacctgccagatgtgctgtttactggtggagaggatggtgctattcgattgttcaatgtttttgatgtctgtgatgatgagggtgacattaaaccagtggcaacttgggtgccacattcaggtcctgttcattctcttgcttttgagtatccatggcttgtgtcagcctcgagtgatggcaggattgcacttattgatttgaggaagcttctgtcctccaaaagttcatcaaagggtctgcgtgttaagagagttgatggaagcgcaatagagcctccacagaggatgcttcatggcgttggatgtgatctcttctccatcgctattggtgcagataggattgtatgtgccggtgaggatggttctgttagagtctggaacttctcaaaagcattggagattgagaggagggcacaggctctaaggagtttgaggcaggagaaccgcatcaggcggaggaaatcacaagcggagatgaatacaaatactagaaggcctgaccagtgttcaatagccatgaaaaagaaccaactgaagggtgataagagcgcaacttggcacaacaagcgtgccattaatgagaaggccaagtcttag

SEQ ID NO: 70 - protein, 564 aa, Zea mays
MAFDCNKERGVSSPDSCSRICTEGTLVQANPLSHYWKPKRLENFNKLENQKSSYESAPSGSDPKQDAEASDEATASLCGFRCFTDLPASLVCEVLARLDAKDLGIVSCVSTLLHALATDHQGWKKLYCERWGLPDLPTTLNGPLLPGVPLDGKFWKTFFVEREFRSKSFMGRFNLDILRGHNEDVRAVSLLVSANLIFTGGRDSVVRMWKMEEGLLIDTSRALGGTIRAIAADSRLLVSGGTNAYIQCWRAVEGNGQLFHISGSGTDQNAEFRLWGHEGPVTCLALDSLRIYSGSWDMTVRVWDRDQMECVQKFMHADWVWDLALRGNTVASTAGRDAYVWDIRAGELTSLISNAHVGSAYSIAWTHLPDVLFTGGEDGAIRLFNVFDVCDDEGDIKPVATWVPHSGPVHSLAFEYPWLVSASSDGRIALIDLRKLLSSKSSSKGLRVKRVDGSAIEPPQRMLHGVGCDLFSIAIGADRIVCAGEDGSVRVWNFSKALEIERRAQALRSLRQENRIRRRKSQAEMNTNTRRPDQCSIAMKKNQLKGDKSATWHNKRAINEKAKS

SEQ ID NO: 71 - DNA, 1278 bp, Vitis vinifera
tggggagctccggttgtttcggggttttcagatgagaaatcatggagggaattgtttgtggagagagagtttaggagcaaaacctttaggggacgatttagtattgatgttctgtatggtcgcactgaggcggttcgagctgttttccttttggcctctgcaaagctcattttcacttctgggtatgattccattgttcgaatgtgggatatggaagaagggttgtcaattgcgtgttcacggcctctcggttgcacaataagagcagtggctgcggataagaaactgttgcttgcggggggtagtgatgggtttattcattgttggagagctgtagaggggctctcttgcttgtttgaccttgtgggttctcaaaacctgagtactgagttccgaatttgggaacatgaaggtcctgtgacttgtcttgctttggatattaagagaatttatagtggctcatgggacatgactgtgcgcatatgggaccgttcttcgtttaaggttgtaaaggtcttgaggcacacagactgggtttggggccttgttcctcgtgatactacagttgctagcacttctggctcagatgtgtatgtttgggacgctgatagtgggactctgctgacgataatctctaatgctcatgtgggtaatgcttatgctttggcacggagccacacaggggattttctattcactgggggagaagatggggcaatacatatgtttgaggtcgtgagtgattgcatggaaaggaatgtattggaggtttcaacgtggattcctcattctggtcctgttcattccctggcatttgagtttccctggcttgtttcagcttcagctgatgggaggatgtcactgattgatgtgagaaagcttttgcaaacttgcaagcctttcttagggaagaatgtttccaaggttaggcacagggaccacaaaagtgtggagccccctcagaggatgttacatgggtttggctgcaatttattctcagtggacattggtgcagatcgtattgtctgtggaggtgagaaaggtgtggttagaatttggaacttctcacaagctttagaagcagagcagagggcccgtgctttaagaggaatacgtttagaaaccaggatgaggcggcgtaggcttcaaatagagctgactagtaagggtagtcgaactgatcaatgttcagttgcagccagtaagaatcctattaatggtgataggagtggtgtgtggcccaataagcggggaatgagtggccggatgaaagcatag

SEQ ID NO: 72 - protein, 425 aa, Vitis vinifera
WGAPVVSGFSDEKSWRELFVEREFRSKTFRGRFSIDVLYGRTEAVRAVFLLASAKLIFTSGYDSIVRMWDMEEGLSIACSRPLGCTIRAVAADKKLLLAGGSDGFIHCWRAVEGLSCLFDLVGSQNLSTEFRIWEHEGPVTCLALDIKRIYSGSWDMTVRIWDRSSFKVVKVLRHTDWVWGLVPRDTTVASTSGSDVYVWDADSGTLLTIISNAHVGNAYALARSHTGDFLFTGGEDGAIHMFEVVSDCMERNVLEVSTWIPHSGPVHSLAFEFPWLVSASADGRMSLIDVRKLLQTCKPFLGKNVSKVRHRDHKSVEPPQRMLHGFGCNLFSVDIGADRIVCGGEKGVVRIWNFSQALEAEQRARALRGIRLETRMRRRRLQIELTSKGSRTDQCSVAASKNPINGDRSGVWPNKRGMSGRMKA

SEQ ID NO: 73 - DNA, 660 bp, Senecio cambrensis
atggcatttgagttaaacccgagcacatcgaattctgaaaaagataaacctcaggataattcatctgaaaataatttactgattgattcggaaagcgggaaacattttgctgctaagttactggttgacgagtgttgtttgttgaaaggttataaaacaattaccgaccttcctccagcgatagtttctgaaatatttaacagccttgatccaaaggaactcgggatagtttcctgtgtgaatacatctttatatcgaattgcatttgatcaccacgtttggaaggagttttattgtgagagatggggacttcctattggagtccccaatacgtctttagagaaatcatggagagacctttttgtggaacgtgagtttcgtagtaagacgtttatgggaccttactctactgaaactctttatggtcatactgaagctgttcgtacagtttttcttttactttcaagaaagattataattacttcgggatatgattcagttattcgaatgtgggacatggaaggtggttattcaattgcttcgtcccgtcctcttggttgtaccatccgagccgttacagcagattcaaaactgttaattgctggcggttccgatggttttattcatggttggagagcccaagaagaagaggacatcctt

SEQ ID NO: 74 - protein, 220 aa, Senecio cambrensis
MAFELNPSTSNSEKDKPQDNSSENNLLIDSESGKHFAAKLLVDECCLLKGYKTITDLPPAIVSEIFNSLDPKELGIVSCVNTSLYRIAFDHHVWKEFYCERWGLPIGVPNTSLEKSWRDLFVEREFRSKTFMGPYSTETLYGHTEAVRTVFLLLSRKIIITSGYDSVIRMWDMEGGYSIASSRPLGCTIRAVTADSKLLIAGGSDGFIHGWRAQEEEDIL

SEQ ID NO: 75 - DNA, 847 bp, Helianthus annuus
  misc_feature (789)..(789): n is a, c, g, or t
gcgggcgacggagtccccgtctctttaaatgctgagtgttctgatgagagatcttggaaggcattatttgtggaacgggaattccggagcaaaacatttctgggccggtatacaatcgatacgctttacggtcatacagaacccgttcgcactctttttgttttgctctcgaaaaagcttataataacttccggttatgactcgattattcgaatgtgggacgttgaagatggttattcaatcgcttcatctcggcctctgggttgcaccatccgagccgttgcagctgattctaagctgttaattgctggcgggtctgatgggtttatacatggctggagagctgaagaaggacaccctcacttgtttgacataaaaggaccccaaaaccagaacaccgagtttcgactttgggaacatcaaggcccgataacttgtatcgggctagattcatctaggatttacagcgggtcatgggacatgaccatacgcgtctgggatcgtgtctcgctcaagtgcttgactgtcttgatgcataacgactgggtgtggagcctggtcccacatgatggtactgtagtaagtacttctggttcagatgtatatatctgggagactaataccttttcacttattgacattatcaaagatgcccatgtgggtaatgcttattctctagctagaagtcacaccggtaatttcatcttcactggtggtgaagatggtgctatacatatgtttgagattactagtaatggatgtggttcagttcgccggctagcaacgtgnggtccacatacgggtcctgtatattctctttcatttgagtttccatggctagtttctg

SEQ ID NO: 76 - protein, 282 aa, Helianthus annuus
  UNSURE (263)..(263): Xaa can be any naturally occurring amino acid
AGDGVPVSLNAECSDERSWKALFVEREFRSKTFLGRYTIDTLYGHTEPVRTLFVLLSKKLIITSGYDSIIRMWDVEDGYSIASSRPLGCTIRAVAADSKLLIAGGSDGFIHGWRAEEGHPHLFDIKGPQNQNTEFRLWEHQGPITCIGLDSSRIYSGSWDMTIRVWDRVSLKCLTVLMHNDWVWSLVPHDGTVVSTSGSDVYIWETNTFSLIDIIKDAHVGNAYSLARSHTGNFIFTGGEDGAIHMFEITSNGCGSVRRLATXGPHTGPVYSLSFEFPWLVS

SEQ ID NO: 77 - DNA, 728 bp, Euphorbia esula
ggatggaaagccgtggagggtcttccacatttgttcaaccttaagggtagttccgagaatcttccaaacgatgaatttcgactttgggaacacgagggacctataacctctctcgccttggatcgcacgagaatttacagtggttcttgggacatgactgttcgtgtatgggatcgttccacattgaagtgccttaaaatcttgaggcatagcgattgggtatggggccttgttccgcacgataccaccgttgccacctcatcgggttccgatgtgtatatttgggatactcaaaccggaactcttatagccgatattaataacgcccatgtcgggaacatttattctctagcccgaagccacacgggagattttctcttcaccggaggagaagatggggctatacatatgtttgagatcattggtaataatggatccaagcctaaggtctacaagatcgcaacttggattccacactcgggtcccgtctactccctctcgtttgaatttccgtggcttgtttcggcttctagtgatgggaaactctcgcttatagatgttcgaaagctacttcgaacaagtaggcgctctatgggaaagaagaatcttggtagggttagcaaaatggatagtaacaatgtggagccacctcaacggatgctccacgggtttggacccaatttgttttcggtagacattggggctgaccggattgtttgtggagggga

SEQ ID NO: 78 - protein, 241 aa, Euphorbia esula
GWKAVEGLPHLFNLKGSSENLPNDEFRLWEHEGPITSLALDRTRIYSGSWDMTVRVWDRSTLKCLKILRHSDWVWGLVPHDTTVATSSGSDVYIWDTQTGTLIADINNAHVGNIYSLARSHTGDFLFTGGEDGAIHMFEIIGNNGSKPKVYKIATWIPHSGPVYSLSFEFPWLVSASSDGKLSLIDVRKLLRTSRRSMGKKNLGRVSKMDSNNVEPPQRMLHGFGPNLFSVDIGADRIVCG

SEQ ID NO: 79 - DNA, 713 bp, Lycopersicon esculentum
atcgtcttgcttcggagcaccatgtgtggaaggagttctattgtgaaaggtgggggcagccaatattgttggcacctttgggcgcagagcatgcagatgagaagtcgtggaaggagcttttcgtggagagggagttccgtagtaaaacattcatgggacgctatagtattgatacattgtatggtcataccgaggctgttaggactgtttctgttttatcttcaaagaaacttctgtttacttcagggtatgatcagatagtgcgaatgtgggacttggaagaaggtttatctattgcatcatctcgccctcttggctgcactattcgtgcagttgcggctgattcgaggctcttagtagcagggggtacagatggattcatacatggttggagagcagaggatggaaatccacatctctttgatcttagatcacctcagaaccagaacatggaattcagagtttgggaacatgaaggaccaataacatgtctggcattggatttgaataagatgtacagtggttcttgggacatgagtattcgtgtttgggatcgttcttctttgaaatgtctgaaagttctaatgcacaatgactgggtttggagccttgctccccatgatacaacagtagcgagcgctgcaggctcagatctttatgtctgggaacactatattgggtcagaacttgccaccatcaccaatggtcatgct

SEQ ID NO: 80 - protein, 236 aa, Lycopersicon esculentum
RLASEHHVWKEFYCERWGQPILLAPLGAEHADEKSWKELFVEREFRSKTFMGRYSIDTLYGHTEAVRTVSVLSSKKLLFTSGYDQIVRMWDLEEGLSIASSRPLGCTIRAVAADSRLLVAGGTDGFIHGWRAEDGNPHLFDLRSPQNQNMEFRVWEHEGPITCLALDLNKMYSGSWDMSIRVWDRSSLKCLKVLMHNDWVWSLAPHDTTVASAAGSDLYVWEHYIGSELATITNGH

SEQ ID NO: 81 - DNA, 717 bp, Aquilegia formosa x Aquilegia pubescens
gtccctcgagactctactattgctagtactgccggggtggatatgtatgtttgggacattgatagtggggaattgcttgctgtaattcaaaaggctcatgttggcaacactctctctttggcccgaagtcacacagggaatttgattttcactggtggggatgatgggactataagtatgtttgagcttttggacgattctacgctcttgcatgtggcaacttggagcccacatactggtgctgtgcactctcttgcatttgagttcccttggcttgtgtcagcctctagcgacggaaagctctcattgattgacattagacggttgctgaaatctagccagcggtctgtgtcaagagacctcaaaagggtaaattgtccagtttcgttgactgtggaggctccacagaggatgttacatggttttggtagtaatttattctcagtgggcattggttctgatcggattgtatgtggtggtgaggaaggtgtagttagaatttggaacttttcacaagctatggagattgagcgtagggttcaggccttaaggggcatgagattagaaaaccgaatgaggcggcggaaggcccaaatagagatgaacagcaagggtggtcgctctgatcagtgttcagttgcagctaagaagaaccagattaatggagacagggcctggcatggtaggcgaggagcgagtggaaagctgaaggcctag

SEQ ID NO: 82 - protein, 238 aa, Aquilegia formosa x Aquilegia pubescens
VPRDSTIASTAGVDMYVWDIDSGELLAVIQKAHVGNTLSLARSHTGNLIFTGGDDGTISMFELLDDSTLLHVATWSPHTGAVHSLAFEFPWLVSASSDGKLSLIDIRRLLKSSQRSVSRDLKRVNCPVSLTVEAPQRMLHGFGSNLFSVGIGSDRIVCGGEEGVVRIWNFSQAMEIERRVQALRGMRLENRMRRRKAQIEMNSKGGRSDQCSVAAKKNQINGDRAWHGRRGASGKLKA

SEQ ID NO: 83 - DNA, 621 bp, Gossypium hirsutum
ggccgcttcgaccggagttgcactggagacttcctttttactggtggagaagatggagcgatacacatgtttgagattataagtgggtctgacgaatctagtgtcgtgcaggttgcaacatggattcctcactcaggtgctgtttactcacttgcatttgagtttccctggcttgtttcagcttccagtgatggtaaacttgcactaattgatgttcggaagttgttgagggccggtaagcgcaccttggggaaaagggtttcaagggataatgacattgaccaaaggaacatagagccaccccagagaatgctccatggatttgggtgcaatttgttctcagtcggtattggtgcagatcgaattgtctgtgggggtgaagaaggtgttgttcgtatctggaacttctcagaagctctagaaattgagcagagggcacgggcactaagaggaatacgtttggagaataggatgaggcgacgcagacttcaaattgagatgaataataagggtggtcgaactgatcaatgttctgttgcagccaagaagaaaacagtcaatggtgataggaatagtgtctggcacagtaaacgtagcataagctccaaggtgaagacataa

SEQ ID NO: 84 - protein, 206 aa, Gossypium hirsutum
GRFDRSCTGDFLFTGGEDGAIHMFEIISGSDESSVVQVATWIPHSGAVYSLAFEFPWLVSASSDGKLALIDVRKLLRAGKRTLGKRVSRDNDIDQRNIEPPQRMLHGFGCNLFSVGIGADRIVCGGEEGVVRIWNFSEALEIEQRARALRGIRLENRMRRRRLQIEMNNKGGRTDQCSVAAKKKTVNGDRNSVWHSKRSISSKVKT

SEQ ID NO: 85 - DNA, 631 bp, Sorghum bicolor
gatacatcccgtgcacttggtggcaccatccgggcgattgcagctgactctaggcttttagtgagtggaggaactaatgcctatattcagtgttggagggctgttgaaggcaatgatcacttatttcacatctctggaagtggtactgaccagaatgcggagtttcgcctctgggggcatgaaggtcctgtgactagtcttgccttggattcactgaggatttatagtggttcttgggacatgactgttcgtgtttgggacagagcccagatggattgcgtgcaaaagttcatgcatgcagactgggtgtggtctcttgctctgcgtggaaatactgttgccagtactgctggtagagatgcatatgtatgggatatcagggacggcgagttaacaagcttagtttccaatgcccatgttggtaatgcatattcattggcttggacacacctggcggatgtgctgtttactggtggagaggatggcgctattcgcttgttcaatgtttctgatgtctctgatgatgaggaggacattaaaccagtggcaacttgggtgccacattcaggtcctgttcattctcttgcttttgagtatccatggcttgtgtcagcctcgagtgatggcagga

SEQ ID NO: 86 - protein, 210 aa, Sorghum bicolor
DTSRALGGTIRAIAADSRLLVSGGTNAYIQCWRAVEGNDHLFHISGSGTDQNAEFRLWGHEGPVTSLALDSLRIYSGSWDMTVRVWDRAQMDCVQKFMHADWVWSLALRGNTVASTAGRDAYVWDIRDGELTSLVSNAHVGNAYSLAWTHLADVLFTGGEDGAIRLFNVSDVSDDEEDIKPVATWVPHSGPVHSLAFEYPWLVSASSDGR

SEQ ID NO: 87 - DNA, 573 bp, Ipomea nil
ggagaagacggagccatacacatgtttgaggttgtaaaaaacgcaaggtttcatgtaaagaaggttgcaacatggattcctcactcgggccctgtttattctcttgcatttgaattcccctggcttgtttccgcttcaagcgatggaaaactggcacttatcgatgtgaggaagttattgaagacaagtaggtattcagcaacaggaagccgtccttgtaaggttgacaatctggaccatacaagtgttgagcctccgcaacgaatgcttcatggatttgggtccaatttatttgcagtggatgttggtctggatcgtattgtgtgtggaggtgaagaaggcgctgttaggatctggaacttctcacaagcgttggagatagagcagagggtccgtgctttacgaggtttaaggttagaaaacaggatgaggaggcgtaagcttcagtccaacatgaatagcaaaggcacccggagtgatcagtgctcggttgcagcaaagaagaaccaaatcaatggcgataggaatagctggcagaacaagcgtagggtaagcgggaagctcaaggcttag

SEQ ID NO: 88 - protein, 190 aa, Ipomea nil
GEDGAIHMFEVVKNARFHVKKVATWIPHSGPVYSLAFEFPWLVSASSDGKLALIDVRKLLKTSRYSATGSRPCKVDNLDHTSVEPPQRMLHGFGSNLFAVDVGLDRIVCGGEEGAVRIWNFSQALEIEQRVRALRGLRLENRMRRRKLQSNMNSKGTRSDQCSVAAKKNQINGDRNSWQNKRRVSGKLKA

SEQ ID NO: 89 - DNA, 615 bp, Solanum tuberosum
ttttccttggcccgaattcacacagggaagctccttattccactgaaggggaagatggagctatacgcatgttcgagatcattagaaatgataaagcttcatctcaggcgtgtggcgacatggattcctcactcgggtgctgtttattctcttgcatttgagttcccttggcttgtttcagcttccagtgatggaaaactctcacttattgatgtgagaaagctgttgaggacgaatcggagttatgtgatggagaagccttcgaaggttgacaatagggctaaaaatgtagagccacctcaaagaatgttacatggatttgggagcaatctgtttgctgtggatattggtcttgatcgtatcgtatgtgctggagaagaaggcattgttaggatctggaacttctcagaagctttggaggttgagcagagagttcgagcattaagaggattaaggttagagaacagaatgaggaggcgtaaacttcagtctgaaatgactggtaaaggcagtcgtgctgatcagtgctcagttgctgctaagaagaatcaattgaatggtgataggaacagctggcgcaacaagcgtagggtgactgggaagctgaaggcctag

SEQ ID NO: 90 - protein, 204 aa, Solanum tuberosum
FSLARIHTGKLLIPLKGKMELYACSRSLEMIKLHLRRVATWIPHSGAVYSLAFEFPWLVSASSDGKLSLIDVRKLLRTNRSYVMEKPSKVDNRAKNVEPPQRMLHGFGSNLFAVDIGLDRIVCAGEEGIVRIWNFSEALEVEQRVRALRGLRLENRMRRRKLQSEMTGKGSRADQCSVAAKKNQLNGDRNSWRNKRRVTGKLKA

SEQ ID NO: 91 - DNA, 632 bp, Zamia fischeri
ggcagacattctcaatcgcctcaatgcaagagaactcagcatagtttcatgtgtatgtaccctctttcgaaggatttcttcagatagccatggatggaaggagttctactgtgagagatgggggcttcctgcgcctagcaaaatttccgcgtcttcggccccgggaccagagaagtcgtggagagagttgtatttggagagagatgcccgaagcaaggccttcctgggccgatttaatgtagacatgctgcatggccacactgcagctcttcgatctgtttgccttctgccatctgcaaatctcatatttacagcaggatatgacacagtactcagaatgtggaacatggaggaaggtctcttgatcgcttgttcccggcctcttggttgcacgctccgtgccatagcggcagacatggatatgttggtggtggcaggaactgatcctttcgtgcgctgttggcaagcaatttctgagcttcctaacttatttgacatttcgggggtttcagggcagaacactgaatcttgccttcgtggacatgttggacccataacttgccttggcctagattcgttgaaaatttacagtggctcttgggacatgagcattcgggtatgggatagggtta

SEQ ID NO: 92 - protein, 210 aa, Zamia fischeri
ADILNRLNARELSIVSCVCTLFRRISSDSHGWKEFYCERWGLPAPSKISASSAPGPEKSWRELYLERDARSKAFLGRFNVDMLHGHTAALRSVCLLPSANLIFTAGYDTVLRMWNMEEGLLIACSRPLGCTLRAIAADMDMLVVAGTDPFVRCWQAISELPNLFDISGVSGQNTESCLRGHVGPITCLGLDSLKIYSGSWDMSIRVWDRV

SEQ ID NO: 93 - DNA, 507 bp, Persea americana
gcgacatggcttcctcacacgggctctgttaattctctagcatttgagttcccatggcttgtgtcatcttccagtgatggacgacttgctctgattgatgtgagaaagctgttaaggtcaagccgacgtacgtcatcaagacaccatgttaaagctaaacggtctgcccccgtaaatgtggagccgcctcaaaggatgttgcatgggtatgggtgcaatttgttttctgtggatattggcgcggataggattgtttgtggtggagaggagggtgttgtgcgtatctggaacttctctaaggcacttgagattgagcagaggattcgggctctgaaagggatacggttggagaaccgaatgaggcggcggaagatacaattagagatgagcagtaagaatcgacctggagatcaatgctctgttgcagccaaaaggaatcagatgcctggtgatagaaacagggtttggcgtggaaggcgcaatatgagtgaaaagccgaaggcctaa

SEQ ID NO: 94 - protein, 168 aa, Persea americana
ATWLPHTGSVNSLAFEFPWLVSSSSDGRLALIDVRKLLRSSRRTSSRHHVKAKRSAPVNVEPPQRMLHGYGCNLFSVDIGADRIVCGGEEGVVRIWNFSKALEIEQRIRALKGIRLENRMRRRKIQLEMSSKNRPGDQCSVAAKRNQMPGDRNRVWRGRRNMSEKPKA

SEQ ID NO: 95 - DNA, 498 bp, Glycine max
  misc_feature (127)..(127): n is a, c, g, or t
gttgctgcttggattcctcactctgcccctgtgtattccctggcctttgagtttccatggcttgtttctgcatcaagtgatggccagctagcactaattgatgtgagaaagctgttgaggattagcnagcgagctctagggaaaagagtttcaaaggtaaagcatttgggtggagacatagtggagcctccacagaggatgttgcatggatttaagagccatcttttctctgtggatataggagctgaacgaattgtcagtggaggtgaagaaggtgttgtcaggatctggaatttcacggaagctttggaaattgaacggagagcccgagcattaagaggaatacgattagagcacagaatgaggcgacggaagcttcaaacagagctgagccataaaagtggtcggagtgatcagtgttcagttgcagcccagaaaaattctgtcacttgtatttggcccactaaacgtggcatgagcggaaagctgaaagcatag

SEQ ID NO: 96 - protein, 165 aa, Glycine max
  UNSURE (43)..(43): Xaa can be any naturally occurring amino acid
VAAWIPHSAPVYSLAFEFPWLVSASSDGQLALIDVRKLLRISXRALGKRVSKVKHLGGDIVEPPQRMLHGFKSHLFSVDIGAERIVSGGEEGVVRIWNFTEALEIERRARALRGIRLEHRMRRRKLQTELSHKSGRSDQCSVAAQKNSVTCIWPTKRGMSGKLKA

SEQ ID NO: 97 - protein, 12 aa, Artificial sequence
  motif 1
  UNSURE (3)..(3): Xaa can be any naturally occurring amino acid
  VARIANT (4)..(4): /replace = "Val" /replace = "Leu"
  VARIANT (6)..(6): /replace = "Arg" /replace = "Gly"
  UNSURE (11)..(11): Xaa can be any naturally occurring amino acid
WKXFYCERWGXP

SEQ ID NO: 98 - protein, 16 aa, Artificial sequence
  motif 2
  VARIANT (3)..(3): /replace = "Ser"
  VARIANT (6)..(6): /replace = "Tyr"
  VARIANT (12)..(12): /replace = "Ser"
  VARIANT (14)..(14): /replace = "Ala" /replace = "Gly"
SLAFEFPWLVSASSDG

SEQ ID NO: 99 - protein, 15 aa, Artificial sequence
  motif 3
  VARIANT (2)..(2): /replace = "Phe"
  VARIANT (8)..(8): replace = "Thr"
  VARIANT (9)..(9): replace = "Ser"
  VARIANT (10)..(10): replace = "Ile"
  VARIANT (12)..(12): replace = "Ile"
IYSGSWDMTVRVWDR

SEQ ID NO: 100 - protein, 7 aa, Artificial sequence
  motif 4
  VARIANT (5)..(5): /replace = "Asp"
FTGGEDG

SEQ ID NO: 101 - protein, 9 aa, Artificial sequence
  motif 5
  VARIANT (2)..(2): /replace = "Ala"
EPPQRMLHG

SEQ ID NO: 102 - protein, 38 aa, Artificial sequence
  conserved region 1
SQWMPHTSPVYSLSFEFPWLVSASGDGKLALIDVRKLL

SEQ ID NO: 103 - protein, 65 aa, Artificial sequence
  conserved region 2
VEPPQRMLHGFGSNLFSVDVGYDRIVCGGEEGTVRIWNFTQALEIERRTRALKGMRHENRMRRRR

SEQ ID NO: 104 - DNA, 1167 bp, Oryza sativa
atccaagccaagaagagggagagcaccaaggacacgcgactagcagaagccgagcgaccgccttcttcgatccatatcttccggtcgagttcttggtcgatctcttccctcctccacctcctcctcacagggtatgtgcccttcggttgttcttggatttattgttctaggttgtgtagtacgggcgttgatgttaggaaaggggatctgtatctgtgatgattcctgttcttggatttgggatagaggggttcttgatgttgcatgttatcggttcggtttgattagtagtatggttttcaatcgtctggagagctctatggaaatgaaatggtttagggtacggaatcttgcgattttgtgagtaccttttgtttgaggtaaaatcagagcaccggtgattttgcttggtgtaataaaagtacggttgtttggtcctcgattctggtagtgatgcttctcgatttgacgaagctatcctttgtttattccctattgaacaaaaataatccaactttgaagacggtcccgttgatgagattgaatgattgattcttaagcctgtccaaaatttcgcagctggcttgtttagatacagtagtccccatcacgaaattcatggaaacagttataatcctcaggaacaggggattccctgttcttccgatttgctttagtcccagaattttttttcccaaatatcttaaaaagtcactttctggttcagttcaatgaattgattgctacaaataatgcttttatagcgttatcctagctgtagttcagttaataggtaatacccctatagtttagtcaggagaagaacttatccgatttctgatctccatttttaattatatgaaatgaactgtagcataagcagtattcatttggattattttttttattagctctcaccccttcattattctgagctgaaagtctggcatgaactgtcctcaattttgttttcaaattcacatcgattatctatgcattatcctcttgtatctacctgtagaagtttctttttggttattccttgactgcttgattacagaaagaaatttatgaagctgtaatcgggatagttatactgcttgttcttatgattcatttcctttgtgcagttcttggtgtagcttgccactttcaccagcaaagttc

SEQ ID NO: 105 - DNA, 55 bp, Artificial sequence
  primer: prm6999
ggggacaagtttgtacaaaaaagcaggcttaaacaatgaatcgtttttctcgttt

SEQ ID NO: 106 - DNA, 49 bp, Artificial sequence
  primer: prm7000
ggggaccactttgtacaagaaagctgggtatccaatcttatcgcttagg

SEQ ID NO: 107 - DNA, 1602 bp, Brassica rapa
atggaattagagtgccaagagagagctgaagttgcgattgttggcgaaggtttatccaatcaaggagctgagttgagaattggagatgggtctgtcgaggttccatgtgtgaagctttgttatcagcaaaagaagtcaactttggtggtgcccagggacaaggatttgtctacaaatactcatcgatacaccattatcgatttgcctcaggctttgatatccgagattcttaactgccttgacccaaaagagttgggccttgtgtcctgtgtttcgacttgtctgcataggttagcttcggagcatcacgcgtggaaaggcttctactgcgagagatgggggctccccgtcgtcttagggggtaaaacttctgaagagaggtcatggaaagagctgtttattgagagggagtttaggagcaagacttttttaggacgtcatagtattgataccctttatggtcacactgaagcagttcgcactgtgtttcttttagcttctgctaagctcattttcacttctggatatgactgcgttgttcggatgtggggaatggaagaaggcttgtctattgcagcgtctaaaccgcttggttgtactattagagcagttgcggctgatacgaagctcttggtagctggcggtactgatggttttatacattgctggaaagcagtggatggtctgagagacttgtttgacctcacgggttttcagaaagagaagacggagtttcgcctttgggagcatgagggtcctattacatctcttgccctggatatgacgagtatctttagcggttcgtgggacatgtctgttcgtatatgggatagatcttcattcaagtgtatcaaaacgttgaggcatagcgattgggtttggggactagcgcctcatgagacaagcatcgcgtgtgctgctggttcggatgtgtacatttgggacattagcagtgagactccagaggcgattatccatgatgctcatgagggtaacacttactctcttgcaagaagccacagtggggatttcttgtttactggtggggaagatggagggatcaaaatgtttgagatcagaaaacacggtaatgaaacaagcgtcctgctcatatctcaatggatgcctcacactggtcccgtctactctctttctttcgagttcccctggcttgtatcagcatctggtgacggtaaactcgctcttatcgacgttaggaagttgttgaagactaaccgtcgtggcttacccaagagggtttcttcgagaattgtggaacccccacagagaatgctgcacgggttcggttcaaacctgttctctgtggacgtgggctgtgaccgtatagtttgtggaggtgaagaaggcgtagttcggatatggaacttcacacaagcgttggagattgagaggagagctcgagctctgaaaggaatgaggcttgagaacaggatgaggcgaaggaggatgcagatggagatgaatgcgaagagtggaaggcctgaccaatgctcgattgctgctcataagaaccctgttaatggagataggaatcgagcgtggcatacaaaacgaagagcaagtggcaaggcgaaggcctaa

SEQ ID NO: 108 - protein, 533 aa, Brassica rapa
MELECQERAEVAIVGEGLSNQGAELRIGDGSVEVPCVKLCYQQKKSTLVVPRDKDLSTNTHRYTIIDLPQALISEILNCLDPKELGLVSCVSTCLHRLASEHHAWKGFYCERWGLPVVLGGKTSEERSWKELFIEREFRSKTFLGRHSIDTLYGHTEAVRTVFLLASAKLIFTSGYDCVVRMWGMEEGLSIAASKPLGCTIRAVAADTKLLVAGGTDGFIHCWKAVDGLRDLFDLTGFQKEKTEFRLWEHEGPITSLALDMTSIFSGSWDMSVRIWDRSSFKCIKTLRHSDWVWGLAPHETSIACAAGSDVYIWDISSETPEAIIHDAHEGNTYSLARSHSGDFLFTGGEDGGIKMFEIRKHGNETSVLLISQWMPHTGPVYSLSFEFPWLVSASGDGKLALIDVRKLLKTNRRGLPKRVSSRIVEPPQRMLHGFGSNLFSVDVGCDRIVCGGEEGVVRIWNFTQALEIERRARALKGMRLENRMRRRRMQMEMNAKSGRPDQCSIAAHKNPVNGDRNRAWHTKRRASGKAKA

SEQ ID NO: 109 - DNA, 1716 bp, Sorghum bicolor
atggcctttgactgcaacaaggaaagaggagattcttcgcctgataattgctcccgcatttgcactgagggtactctcgtccaggcaaatcccttatctcactactggaagcctaagggtttgaagagcctcaacaaattggagaaccagaagtccagtcatggatctgttccgagagacgataatccagaacaagaagctgaagcgagcgatgaggcatctgcctcaacctgtggcatcaggtgcttcaccgatctgccggctgctttggtctgcgaggtccttgcacgcctcgatgcaaaggaccttggaattgtatcctgtgtctccaccctcctgcatgccttagccacagatcatcagggatggaagaagttatactgcgaaaggtgggggcttccagaccttcccgacgccctgaatgggcccttgttgcctggtgcccccctagatgggaagtcttggaaaacatttttcgtggagcgggagttcaggagtaaatcattcatgggtagattcaatgtggatattctccgtggccacaatgaggatgttcgagccgtcttccttttggtatcagcaaatctgatattcactggcgtcactggcggccgcgattctgtggttagaatgtggaaaatggaggaagggttattgattgatacatcccgtgcacttggtggcaccatccgggcgattgcagctgactctaggcttttagtgagtggaggaactaatgcctatattcagtgttggagggctgttgaaggcaatgatcacttatttcacatctctggaagtggtactgaccagaatgcggagtttcgcctctgggggcatgaaggtcctgtgactagtcttgccttggattcactgaggatttatagtggttcttgggacatgactgttcgtgtttgggacagagcccagatggattgcgtgcaaaagttcatgcatgcagactgggtgtggtctcttgctctgcgtggaaatactgttgccagtactgctggtagagatgcatatgtatgggatatcagggacggcgagttaacaagcttagtttccaatgcccatgttggtaatgcatattcattggcttggacacacctggcggatgtgctgtttactggtggagaggatggcgctattcgcttgttcaatgtttctgatgtctctgatgatgaggaggacattaaaccagtggcaacttgggtgccacattcaggtcctgttcattctcttgcttttgagtatccatggcttgtgtcagcctcgagtgatggcaggagtgatggcaggattgcacttattgatttgaggaagcttctgactcccaaaagatcatcaaaaggtctgcgtgttaagagctttgatgcaagtgccatagagcctccacagaggatgcttcatggcgttggatgtgatctcttctccatcgccattggtgcagataggattgtatgtgcaggtgaggatggttctgttagagtctggaacttctcagaagcactggagattgagaggagggcacaggctctaaggagtttgaggcaggagaaccgcatgaggcggaggaaggcacaagtagagatgaatgcaaatggtagaaggcctgaccagtgctcaatagccatgaaaaagaaccaactgaaggctgataagagtgccacttggcacaacaagcgtgccgttaatgagaaggccaagtcttag

SEQ ID NO: 110 - protein, 571 aa, Sorghum bicolor
MAFDCNKERGDSSPDNCSRICTEGTLVQANPLSHYWKPKGLKSLNKLENQKSSHGSVPRDDNPEQEAEASDEASASTCGIRCFTDLPAALVCEVLARLDAKDLGIVSCVSTLLHALATDHQGWKKLYCERWGLPDLPDALNGPLLPGAPLDGKSWKTFFVEREFRSKSFMGRFNVDILRGHNEDVRAVFLLVSANLIFTGVTGGRDSVVRMWKMEEGLLIDTSRALGGTIRAIAADSRLLVSGGTNAYIQCWRAVEGNDHLFHISGSGTDQNAEFRLWGHEGPVTSLALDSLRIYSGSWDMTVRVWDRAQMDCVQKFMHADWVWSLALRGNTVASTAGRDAYVWDIRDGELTSLVSNAHVGNAYSLAWTHLADVLFTGGEDGAIRLFNVSDVSDDEEDIKPVATWVPHSGPVHSLAFEYPWLVSASSDGRSDGRIALIDLRKLLTPKRSSKGLRVKSFDASAIEPPQRMLHGVGCDLFSIAIGADRIVCAGEDGSVRVWNFSEALEIERRAQALRSLRQENRMRRRKAQVEMNANGRRPDQCSIAMKKNQLKADKSATWHNKRAVNEKAKS

SEQ ID NO: 111 - DNA, 1779 bp, Vitis vinifera
atggcatttgaatgccaagagagtatagaggtttgtttggtgaaaaattcaatagattctgatgaacaacaggstggattgagtgattttaattccaattttaatcatatcacttcaatttttgatgccaaatctcaattggaaaccgaaactgcacaccgagaaagtggagtggtttgtttgttgaagaattcaattgaagaacgggctggattgactcagtttagtcccgattctgatcacaatactttaatacrtgactcgggaaattcccaatcggaaattgaaatcggaatccaaaaaccttcaacttcaaaccccaaagttaacgacacttcaggacattatcgtaggttgataactgatcttccgtccgcgttgatatcggaaattcttaattgccttgacccgaaagagcttggtgtggtttcgtgtgtctcaactgttctcaataggctagcgtcygagcactccgtttggaaagatttctattgtgagaggtggggagctccggttgtttcggggttttcagatgagaaatcatggagggaattgtttgtggagagggagtttaggagcaaaacctttaggggacgatttagcattgatgttctgtatggtcacactgaggcggttcgagctgttttccttttggcctctgcaaagctcattttcacttctgggtatgattccattgttcgaatgtgggatatggaagaagggttgtcaattgcgtgttcacggcctctcggttgcacaataagagcagtggctgcggataagaaactgttgcttgcggggggtagtgatgggtttattcattgttggagagctgtagaggggctctcttgcttgtttgaccttgtgggttctcaaaacctgagtactgagttccgaatttgggaacatgaaggtcctgtgacttgtcttgctttggatattaagagaatttatagtggctcatgggacatgactgtgcgcatatgggaccgttcttcttttaaggttgtaaaggtcttgaggcacacagactgggtttggggccttgttcctcgtgatactacagttgctagcacttctggctcagatgtgtatgtttgggacgctgatagtgggactctgctgacgataatctctaatgctcatgtgggtaatgcttatgctttggcacggagccacacaggggattttctattcactgggggagaagatggggcaatacatatgtttgaggtcgtgagtgattgcatggaaaggaatgtattggaggtttcaacgtggattcctcattctggtcctgttcattccctggcatttgagtttccctggcttgtttcagcttcagctgatgggaggatgtcactgattgatgtgagaaagcttttgcaaacttgcaagccttccttagggaagaatgtttccaaggttaggcacagggaccacaaaagtgtggagccccctcagaggatgttacatgggtttggctgcaatttattctcagtggacattggtgcagatcgtattgtctgtggaggtgaggaaggtgtggttagaatttggaacttctcacaagctttagaagcagagcagagggcccgtgctttaagaggaatacgtctagaaaacaggatgaggcggcgtaggcttcaaatagagctgactagtaagggtagtcgaactgatcaatgttcagttgcagccagtaagaatcctattaatggtgataggagtggtgtgtggcacaataagcggggaatgagtggcaggatgaaagcatag

SEQ ID NO: 112 - protein, 592 aa, Vitis vinifera
  UNSURE (25)..(25): Xaa can be any naturally occurring amino acid
  UNSURE (86)..(86): Xaa can be any naturally occurring amino acid
MAFECQESIEVCLVKNSIDSDEQQXGLSDFNSNFNHITSIFDAKSQLETETAHRESGVVCLLKNSIEERAGLTQFSPDSDHNTLIXDSGNSQSEIEIGIQKPSTSNPKVNDTSGHYRRLITDLPSALISEILNCLDPKELGVVSCVSTVLNRLASEHSVWKDFYCERWGAPVVSGFSDEKSWRELFVEREFRSKTFRGRFSIDVLYGHTEAVRAVFLLASAKLIFTSGYDSIVRMWDMEEGLSIACSRPLGCTIRAVAADKKLLLAGGSDGFIHCWRAVEGLSCLFDLVGSQNLSTEFRIWEHEGPVTCLALDIKRIYSGSWDMTVRIWDRSSFKVVKVLRHTDWVWGLVPRDTTVASTSGSDVYVWDADSGTLLTIISNAHVGNAYALARSHTGDFLFTGGEDGAIHMFEVVSDCMERNVLEVSTWIPHSGPVHSLAFEFPWLVSASADGRMSLIDVRKLLQTCKPSLGKNVSKVRHRDHKSVEPPQRMLHGFGCNLFSVDIGADRIVCGGEEGVVRIWNFSQALEAEQRARALRGIRLENRMRRRRLQIELTSKGSRTDQCSVAASKNPINGDRSGVWHNKRGMSGRMKA

SEQ ID NO: 113 - DNA, 745 bp, Zea mays
atggcggacaaggagcctgtcgtggagcgatccgaggcgtctgaggaggaggacgcctccgccgcggccgccgcgggggaggaagaggacacgggtgcccaggtggcccccatcgtgcggcttgaggaggtactcgtcaccaccggtgaggaggacgaggacgtcctgctcgacatgaaggcgaagctgtaccggtttgataaagacgggaatcaatggaaggaacggggcacgggcaccgtcaagcttctcaagaacaaggagaccggcaaggtccgactggtcatgcgccaggccaagacgcttaagatctgcgcgaaccacctcgtggcccccaccacgagaatgcaggaacatgccggcagcgacaaatcgtgcgtctggcacgcttctgactttgcggatggcgaactcaaggaggagatgtttgccatcaggtttggttcggtagaaaactgcaagaagttcaaggagttggttgaggagattgctgagtcacttacagagaacgaggacaaggaaggtcaagatggctcttccacggccggattgctggagaagctcactgtgagcgagggcaaatctgaggaaagtggcaagtcggagtccactgattctggcaaagtgaccgaaaccaaagccgatgcagccccagccgagtagttggtgtggttgcactacccagctttcttgtacaaagttggcattataagaaagcattgcttatcaatttgttgcaacgaac

SEQ ID NO: 114 - protein, 220 aa, Zea mays
MADKEPVVERSEASEEEDASAAAAAGEEEDTGAQVAPIVRLEEVLVTTGEEDEDVLLDMKAKLYRFDKDGNQWKERGTGTVKLLKNKETGKVRLVMRQAKTLKICANHLVAPTTRMQEHAGSDKSCVWHASDFADGELKEEMFAIRFGSVENCKKFKELVEEIAESLTENEDKEGQDGSSTAGLLEKLTVSEGKSEESGKSESTDSGKVTETKADAAPAE

SEQ ID NO: 115 - protein, 196 aa, Zea mays
MADKEPVVERPEAGEEEEDASAAAAAGEEEDTGAQVAPIVRLEEVAVTTGEEDEDVLLDMKAKLLPIRQRRMRQAKTLKICANHLVASTTKMQEHAGSDKSCVWHAADFADGELKEEMFAIRFGSVENCKKFKELVEEIAESLTKNEGKEGEDGGSTAGLLAKLTVSEGKSEGSGKSESTDSGKVTETKADTAPAE

SEQ ID NO: 116 - DNA, 725 bp, Arabidopsis thaliana
atgccaactttgtacaaaaaagcaggcttcacaatggcgagcattagcaacgagcccgagcgtgagaacagagacgaagaagagactggagccaacgaagatgaagacaccggtgctcaggttgctcctatcgtcaggcttgaagaagtcgccgtcaccaccggtgaagaagacgaagacaccatcctcgatctgaaatcgaagttgtatcgatttgataaagatggaagtcagtggaaggagagaggtgctggtactgttaagtttttgaaacatagagtttctgggaagattcgtctcgttatgaggcaatcgaaaactttgaagatctgtgctaatcatcttgttggatcgggtatgagtgttcaggaacacgctgggaatgataagtcttgtgtatggcacgctcgtgatttctccgatggtgaattgaaggatgagctcttctgtatccggtttgcttcagttgagaattgcaaagcatttatgcaaaagttcaaggaagtagctgaatctgaagaagagaaagaagagagcaaagatgcctctgataccgctggtcttcttgagaagttaacagtggaagagaaggaaagtgagaagaaaccagtggagaaggcagaggaaaacaaaaagagtgaagctgttgaagaaaagaaaacagaggagtctgttccctcagcttaagatgcacccagctttcttgtacaaagttggcattataa

SEQ ID NO: 117 - protein, 228 aa, Arabidopsis thaliana
MPTLYKKAGFTMASISNEPERENRDEEETGANEDEDTGAQVAPIVRLEEVAVTTGEEDEDTILDLKSKLYRFDKDGSQWKERGAGTVKFLKHRVSGKIRLVMRQSKTLKICANHLVGSGMSVQEHAGNDKSCVWHARDFSDGELKDELFCIRFASVENCKAFMQKFKEVAESEEEKEESKDASDTAGLLEKLTVEEKESEKKPVEKAEENKKSEAVEEKKTEESVPSA

SEQ ID NO: 118 - protein, 217 aa, Arabidopsis thaliana
MASISNEPKRENRDEEETGANEDEDTGAQVAPIVRLEEVAVTTGEEDEDTILDLKSKLYRFDKDGSQWKERGAGTVKFLKHRVSGKIRLVMRQSKTLKICANHLVGSGMSVQEHAGNDKSCVWHARDFSDGELKDELFCIRFASVENCKAFMQKFKEVAESEEEKEESKDASDTAGLLEKLTVEEKESEKKPVEKAEENKKSEAVEEKKTEESVPSA

SEQ ID NO: 119 - DNA, 1416 bp, Arabidopsis thaliana
gcgaaacccccaaattctcttctctctatctctctcgcgtacgccgcaccgtagcgaccaattgaatccacgaggaaatctcagtaaatactatggcgaccaacgaacccgagcacgagcacagagacgaggaagaggccggagctaacgaggatgaggacaccggagctcaggtcgctccgatcgttaggcttgaggaggttgccgtcactaccggcgaggaagacgaagatgccgtccttgatctgaaatcgaagctttatcgattcgataaggatgcgaatcagtggaaggagagaggagctggtactgtgaagttcttaaagcataagaacactgggaagattcgtctcgttatgaggcaatctaaaactttgaagatctgtgctaatcacttcgttaaatcgggcatgagtgttcaggaacacgttgggaatgaaaagtcatgtgtgtggcacgctcgtgactttgctgatggtgaactcaaggatgagcttttctgtatccgatttgcttctattgagaattgcaaaacatttatgcaaaagttcaaggaagttgctgagtctgaagaagagaaagaagagagcaaagatgccgctgacactgctggccttcttgagaaattgactgtggaagagacaaaaacggaggagaaaaccgaagcgaaagctgtggagacggcaaagactgaagtgaaagcagaagaaaagaaagagagcgaggcagagaaatctggtgaagcaaagaaaacagaagaaagtggtccctcaacataagaagcgtcatcatttaagttgccaaatcctggcgaggtaattaagcctcgaaatgttttgatgcatcatgagtctaccattgtcttggcactatctatctatacatgttttgtcgagtcatatcaagtggttgggggatcgcttggggtcgggttttactgaatgctgagtcgttatgggtctaatagtttttgagtctaaagtgtcgggtgatatgagagatttgggtgaaatattttttcatgttggttatctgaaagagtacattggtttcattgttttaagttttctcatggatcctttttggatggtcttattttgaggatacaaatgtgtttgtccatggacaagaatcagaagtctccattttttttttttcaaaatttaatgcatgtgattttttaatcttaaggtaattgccaattgtttgacaaaaaaaaggtaattgccaatctactttgctctcttgtgttagtcgatgctagtcttgaccctgataaagatccaaaatgtatattaacagtattcataaaattcttcagttataacgaactgttcacggaaaaaaaatgacattgtactatactgtgctaaaattaccaaagcatgatttatataaatcatatccagtaagacc

SEQ ID NO: 120 - protein, 228 aa, Arabidopsis thaliana
MATNEPEHEHRDEEEAGANEDEDTGAQVAPIVRLEEVAVTTGEEDEDAVLDLKSKLYRFDKDANQWKERGAGTVKFLKHKNTGKIRLVMRQSKTLKICANHFVKSGMSVQEHVGNEKSCVWHARDFADGELKDELFCIRFASIENCKTFMQKFKEVAESEEEKEESKDAADTAGLLEKLTVEETKTEEKTEAKAVETAKTEVKAEEKKESEAEKSGEAKKTEESGPST

SEQ ID NO: 121 - DNA, 660 bp, Arabidopsis thaliana
atggcgagcactgagccagagcgtgagaaccgtgaagatgaaaccgaagtcaacgaagatgaagacaccggagctcaggtagctccgatcgttaggcttgaagaggttgcagtcaccaccggcgaagaagatgaagacgccgtcctcgatctgaaatcgaagatgtatcgattcgataaagaagggaaccaatggaaggagagaggagctggaactgtgaagttattgaagcataaggaaactggaaaagttcgtcttgttatgagacaatctaaaaccctaaagatctgtgccaatcacctcatttcgtctgggatgagtgttcaggaacatagtgggaatgaaaagtcttgtttatggcacgctactgatttctccgacggcgagttgaaagatgagcttttctgcattcgatttgcttccattgagaattgcaaaacatttatggagaagttcactgaaatagctgaaagccagcaagtagggaaagagagcacccagggcgacgaggctgctggtttaatagagaatctttcggttgaggaaaatataagtgaggagaaagccaaggaagcagaagagaaagagcctgcaaaggaagataaagaaacaaaaaaggagaaggtagaagaagagaagaaaacagaggcaagcacttaa

SEQ ID NO: 122 - protein, 260 aa, Arabidopsis thaliana
MASTEPERENREDETEVNEDEDTGAQVAPIVRLEEVAVTTGEEDEDAVLDLYVTRSVNILVSLPLVKMYRFDKEGNQWKERGAGTVKLLKHKETGKVRLVMRQSKTLKICANHLISSGMSVQEHSGNEKSCLWHATDFSDGELKDELFCIRFASIERKMVWKILEWLTDSVASTDCKTFMEKFTEIAESQQVGKESTQGDEAAGLIENLSVEENISEEKAKEAEEKEPAKEDKETKKEKVTQSVIDMFGVAAKGTIMWCF

SEQ ID NO: 123 - DNA, 1104 bp, Lycopersicon esculentum
aaaaaaagcaaaaagaaaagaggcaaagttatcaaatcaaaaaccctacttcctcccttgttgttcttcttcttcttcaaatccggggtaaatctttctaaaaccaaaaatctagagtgatggcaagcactactgttgaacccaaattggagaagaaagaagaggaagtagaagcagaagtagaagaaaacccaactggcgatgatgaagacactggtgcacaagttgctcccattgttaggctacaagaagttgctgtctccactggtgaagaaaatgaacatgttcttcttgatctgaaatcaaagttataccgatttgacaaggaagggagtcaatggaaagagagaggtgttgggactgtgaagcttctcaagcacaaggaaactggaaaggttaggcttgtgatgaggcaatccaagacgctgaaaatctgtgccaaccacttggtccttcctactatgtcgatccaagaacatgctgggaatgagaagtcttgtgtgtggcatgctgctgactttgctgatggagaactgaaagatgagactttttgcatccgctttgcttcagttgagaattgcaaggctttcaaagagaaggttgaagaaattgctgaatctcaacagacaaagtctggacaaagtgaagaagctggtgctgctgctactgaacttattgaaaagcttagtgttgaaagcaaagataaaaatgacaaacctgaagacaaagaggcccctgcagctacagaggaaaaggaagataagaaggaagagaaagctgaagaaaagaattaaaatgtttgtattgtcggtcagtttttttttttgaaaggttaatagcattcgttgtttctgtctgatccaatagatatgatagatataagcaatgtgtctcttgtggtcttatttgttgttgttgggatggtttggattttcatttgggtcttgagtcgagtgcagcttcatgttttattgtggtctttggtgtttccttgtacttatttattgtgtgtttgcaaattttggttcatggggtacaccacccagtataagggattacgtttgttaaaacctttagcactgttagtgagatcatttttgagtt

SEQ ID NO: 124 - protein, 224 aa, Lycopersicon esculentum
MASTTVEPKLEKKEEEVEAEVEENPTGDDEDTGAQVAPIVRLQEVAVSTGEENEHVLLDLKSKLYRFDKEGSQWKERGVGTVKLLKHKETGKVRLVMRQSKTLKICANHLVLPTMSIQEHAGNEKSCVWHAADFADGELKDETFCIRFASVENCKAFKEKVEEIAESQQTKSGQSEEAGAAATELIEKLSVESKDKNDKPEDKEAPAATEEKEDKKEEKAEEKN

SEQ ID NO: 125 - DNA, 442 bp, Oryza sativa
caacctctccccccacgatcgccctcctccccgaaacttctggaaccgagagcagcagacgttagctcttctcctccgatggcggacaaggagcccgtcgtggaccgccccgaggacgaggaggaggcctccgccgccgccgccgccgcgggcggcgaggaggaggacacgggcgcccaggtcgcccccatcgtgcggctcgaggaggtcgccgtcaccaccggcgaggaggacgaggacgtgctcctcgacatgaaggcgaagctttaccggtttgacaaggaggggaaccagtggaaggagcgggggacgggcaccgtcaagctcctcaagcacaaggagaacggcaaggtccgcctcgtcatgcgccaggccaagacgctcaagatctgcgcgaaccacctagttgcttcgaccacgaagatgcaggagcatgcgggca

SEQ ID NO: 126 - protein, 121 aa, Oryza sativa
MADKEPVVDRPEDEEEASAAAAAAGGEEEDTGAQVAPIVRLEEVAVTTGEEDEDVLLDMKAKLYRFDKEGNQWKERGTGTVKLLKHKENGKVRLVMRQAKTLKICANHLVASTTKMQEHAG

SEQ ID NO: 127 - DNA, 1063 bp, Zea mays
gcacgcggtaaacaccccacgtctcaagctgcccctttctcaccgccgcggccgccacgcgcagcagcaaccgagcaggagcgcagccagcaagctcaggcccgagccctactgcaaccgccgctgctaccgcactgaacaccatggccgacccggcggagcaccgtccagcggaggaggacgaggaagccgcggcggccggcgaggatgaggacaccggcgctcaggtcgcgcccatcgtgaagctggaggaggtcgccgttaccaccggagaggaggacgaggacgtacttgtcgacatgaaggcgaagctctaccggttcgacaaggaggcgaaccagtggaaagaacgtggcacaggcactgtgaagctgcttaagcacaaggagaccgccaaggtccgcctcgtcatgcgtcaggcgaagacgcttaagatctgtgctaaccatcttgtggtggcgacgactaagatgcaggagcacgcagggagcgacaagtcgtgcgtgtggcacgcgctggacttcgccgacggtgagctcaaggaggagatgtttgctatccgttttggatctgtcgagaattgcaagaagttcaaggacactgttgaagagatagctgaagagcaaggaaagaccgaggtgaaagaaaacgaggaagtctccattgccgccgcagatttggtacagaagttaacagtgacagaggctagcaacgagggagatgcagaggaagaggaggctcctgcatctgaccataagaaggatgctaaagggtaaagattgaaggcaaacaaggccaaatgattatgattccattcatttcgttgtcaaggttcatcttccccacaaattttcattacaaagtttcattgcattttctcctgagatgatttgtgtgtgtgtgtgtgtgtgtgtgtgtgtgttgggtgaaatctgagttgtcagtcatctacatgtctttcttggttgttagacttattctcagtcgcctgtttatctgggatggctaggtacatcatgtttgtacaattatttggggttgatttaaaaaaaagaaaaaaaaa

SEQ ID NO: 128 - protein, 210 aa, Zea mays
MADPAEHRPAEEDEEAAAAGEDEDTGAQVAPIVKLEEVAVTTGEEDEDVLVDMKAKLYRFDKEANQWKERGTGTVKLLKHKETAKVRLVMRQAKTLKICANHLVVATTKMQEHAGSDKSCVWHALDFADGELKEEMFAIRFGSVENCKKFKDTVEEIAEEQGKTEVKENEEVSIAAADLVQKLTVTEASNEGDAEEEEAPASDHKKDAKG

SEQ ID NO: 129 - DNA, 1111 bp, Oryza sativa
ggacgcgcagcaaccggcagcagcagcagaggaggaggccagggcaacccgcaaccccaaaccctactcccgccgcgccaccgccatggccgacccagcggagcaccgtgaggaggaggaggaggccgcggcggcggcggcgggcgaggacgaggacaccggcgcccaggtcgcgcccatcgtcaagctcgaggaggtcgccgtcaccaccggcgaggaggacgaggaggtcctcctcgacatgaagtcgaagctgtaccgcttcgacaaggaggggaaccaatggaaggagagaggcaccggcacggtgaagctgctgaagcacaaggagaccggcaaggtccgtctcgtcatgcgccaggctaagacgctcaagatctgcgccaatcacctcgtggcgacgaccacgaagatgcaggagcacgccggcagcgacaagtcgtgcgtgtggcacgcgctggacttcgccgacggcgagctcaaggaggaaatgttcgccatacgctttggatccgtcgagaactgcaagaagttcagggagatggtagaagagattgctgagcagcaaggaaagaacgaggagaaagaaaatgaggaagtctcctctactgcagggttggttgagaagctttcagtgaccgagacaaaaaaggaggaaaatgcagagaaagaggagactcctgcagaagaggataagaaggacgctaaagagtgaaagcacccgcaacctctaggcagctttgatatgcctgaagcgagtgaagtgttaaatgagcgtcatttcattcattttgtggtcaaagttcttcctttcacaaattttcattgtgttttcttttggatgaatgtttgtgctaggcaaaatttgagttgtatcagtcgggttcttggttactacactgttacttaaaccttgagttgtttatccgagatggggtggcggagtgggggcacagcatgtttgtacaattatttgaagttgcttttggaatgggcacggtttgggttgtccaaaatttggacggtgatgccctgtcactcacaattcttatctctgtcttgcaattatatgcgatgtgaagctcttcgcctcttcggtgacgagttgtcg

SEQ ID NO: 130 - protein, 209 aa, Oryza sativa
MADPAEHREEEEEAAAAAAGEDEDTGAQVAPIVKLEEVAVTTGEEDEEVLLDMKSKLYRFDKEGNQWKERGTGTVKLLKHKETGKVRLVMRQAKTLKICANHLVATTTKMQEHAGSDKSCVWHALDFADGELKEEMFAIRFGSVENCKKFREMVEEIAEQQGKNEEKENEEVSSTAGLVEKLSVTETKKEENAEKEETPAEEDKKDAKE

SEQ ID NO: 131 - DNA, 767 bp, Populus balsamifera subsp. trichocarpa
tctcctctccaagcaagaacatcaaatctaatggcaagcacagaacccgaacacgagcacagagaagatgaggaagctccggctggcgaagacgaagacaccggtgctcaggttgctccgatcgtcaagctcgaagaagttgctgtctctaccggtgaagaagatgaagatgcgatcctcgatctgaaatcgaagctttatagatttgataaggacgggaatcagtggaaagagagaggtgctggcactgtcaagttattgaagcataaagagtctggaaaagttcgtcttgttatgagacaatctaagactctcaagatctgcgctaatcatctcgtgctgccgactatgtccgtgcaggagcacgcagggaatgataagtcgtgtgtgtggcacgctacagatttcgctgatggtgaattgaaggatgagttgttctgcattcgtttcgcatctgttgaaaattgcaaaacctttatggaaatgtttcaagaagttgctgaatcccaagagagcaaagaggaaaatgaggatgcaactgttgctgctgatgcattggagaagttgagtgttgaagggaagaaaactgaggagaatgctggcgaagaggcacctgctgcaaccaagaatgaggaaactaagactgatacagataagaaaggggagaagcctgctccctcaacttgagggttgatttgtttgttttgccattcccttggcagtatgatgagttcagttgtcaaccatatttcttgtccattttgtgg

SEQ ID NO: 132 - protein, 218 aa, Populus balsamifera subsp. trichocarpa
MASTEPEHEHREDEEAPAGEDEDTGAQVAPIVKLEEVAVSTGEEDEDAILDLKSKLYRFDKDGNQWKERGAGTVKLLKHKESGKVRLVMRQSKTLKICANHLVLPTMSVQEHAGNDKSCVWHATDFADGELKDELFCIRFASVENCKTFMEMFQEVAESQESKEENEDATVAADALEKLSVEGKKTEENAGEEAPAATKNEETKTDTDKKGEKPAPST

SEQ ID NO: 133 - DNA, 1105 bp, Saccharum officinarum
ggagaacacctacccgtctccccaccctagccccgccgtcgcgtcctcttcgaatcgaatcgcgccgcgatcacctcatctcatggcggacaaggagcctgtcgtggagcgacccgaggcggctgaggaggaggacgcctcagccgccgccgctgccgcgggggaggaggaggacacgggcgcccaggtggcccccatcgtgcggcttgaggaggtagacgtcaccaccggcgaggaggacgaggacgtcctgctcgacatgaaggcgaagttgtaccgatttgacaaagacgggaaccaatggaaggaacggggcaccggcaccgtcaagcttctcaagcacaaggagaccggcaaggtccgactcgtcatgcgccaggccaagacgcttaagatctgcgcgaaccacctcgtggcctcgaccacgaagatgcaggagcatgccggcagcgacaagtcatgcgtctggcacgctgctgactttgccgatggcgaactcaaggaggagatgtttgccatcaggtttggttccgtagaaaattgtaagaagttcaaggagttggttgaggagatttctgagtcgcttacaaagaacgagggcaaggaaagtgaagatggttcttccacagctggattgctggagaagcttactgtgagtgagcacaaatctgaggaaagtgacaagtcggagtccactgattctggcaaagtgaccgaaaccaaagccgacacagccccagctgagtagttggtggtggcagatcctcccggtgccaaatcagtttgtgtccttccagtggaagtttggtgcccatttgccatgaaatatgactgctaacatttgggggcgagttggagcagtctcagatgtttggatttggtctagtctggtttggtccgggcttgattttgttaaaaacttagtacattggggttggaacgtttggtatgcgagtcgctagtatttcactgcatggattgttatggattgcggtataaggtgcatcttatattttttttatttcgttcaatacacatacatgtgttgtattaatactttatgccaatgcccatggggagagttgaatttgaatgtcgagagtgg

SEQ ID NO: 134 - protein, 221 aa, Saccharum officinarum
MADKEPVVERPEAAEEEDASAAAAAAGEEEDTGAQVAPIVRLEEVDVTTGEEDEDVLLDMKAKLYRFDKDGNQWKERGTGTVKLLKHKETGKVRLVMRQAKTLKICANHLVASTTKMQEHAGSDKSCVWHAADFADGELKEEMFAIRFGSVENCKKFKELVEEISESLTKNEGKESEDGSSTAGLLEKLTVSEHKSEESDKSESTDSGKVTETKADTAPAE

SEQ ID NO: 135 - DNA, 1034 bp, Saccharum officinarum
acagcagcaaccggtagcaggagcgcagccagcaagcgcaggccccgagccgtactgcaaccgccgctgccaccgcgccgaacgccatggccgacccggcggagcaccgccctgcggaggaggaggaggaggccgcggcggccggcgaggatgaggacaccggcgcccaggtcgcgcccatcgtaaagctggaggaggtcgccgttaccaccggagaggaggacgaggacgtgctcctcgacatgaaggcgaagctttaccggttcgacaaggaggggaaccagtggaaagagcgcggcactggcactgtgaagctgctcaagcacaaggagaccgccaaggtccgcctcgttatgcgtcaggcgaagacgcttaagatctgcgctaaccatctcgtggtggcgacgactaagatgcaggagcacgcggggagcgacaagtcgtgcgtgtggcacgcgctggacttcgccgacggcgagctcaaggaggagatgttcgctatccgttttggatctgtcgagaattgtaagaagtttaaggatattgttgaagagatagctgaacagcaaggaaagactgaggagaaagaaaacgaggaagcctccactgccgctgatttggtacagaagttaacagtgacggaggccagcaaggaggaaactgcggagaaagaggaggctcctgcatctggcgataagaaggatgctaaagattgaaggcgtttatatacgcaaacaatggtcaaatgagtgtccttccattcattttgttgtcaaggttcatctaccctccacaaattttcatcgtgttttctctgggatgaatgcttgtgttaggtgaaatcagagtcatcagtcatctacatggttttcttggtcatagactgttatttttaagtcgcctgtttatctgggatggctggggtcagcatgtctgtacaattatttggagttgcttttggaatggacgcggtttgatgagtagcctaaagcttgagatggtggtgatgtcttttcgctccacttttcttattc

SEQ ID NO: 136 - protein, 209 aa, Saccharum officinarum
MADPAEHRPAEEEEEAAAAGEDEDTGAQVAPIVKLEEVAVTTGEEDEDVLLDMKAKLYRFDKEGNQWKERGTGTVKLLKHKETAKVRLVMRQAKTLKICANHLVVATTKMQEHAGSDKSCVWHALDFADGELKEEMFAIRFGSVENCKKFKDIVEEIAEQQGKTEEKENEEASTAADLVQKLTVTEASKEETAEKEEAPASGDKKDAKD

SEQ ID NO: 137 - DNA, 1039 bp, Medicago sativa
atgtctacaagcaccgatcatcacgaagaggaagatgttcccgccggcgatgaagaagacaccggcgctcaaatcgctccgatcatccaacttcatgaagtcgctgtttctactggtgaagaagatgaagaagctattctcgacctaaaagcgaaactgtaccgatttgacaaggtagggaatcaatggaaggaacgaggggcaggaactgttaagtttttgaagcataaggttactggaaaagttaggcttgttatgagacaatcaaagactcttaagatctgtgctaatcatctcattttgcctaaaatgactgtgcaagagcatgctgggaatgagaaatcttgtgtttggcacgcgaaggactttgctgatggtgaattgaaagacgagtttttctgcattcgatttgcgtcaattgaaaattgcagaaagttcatagagacatttcaagaaattgctgaatccctgaacaaagaggaaagcaaggatgcatccactgctgctgatctccttgagaatttgagtgttgaagggaaagcagatgcagaaaagaaagataaagagaaatctgaggagaaaactaaggagaaagagacaccagaaaaagaaagcaaggaagatacagaaaagaaagttgaagagcctgcttcatctgcttgattatgatatgttcatattttcgacaaggcaatatggaaaagtttggtggttgaccttcgtgccactcttatcaatactctctcatagtactagtcttcaggttgttttgttgctacgttattgagtggttgatatccttcgttgaattattgtcagcaaggttggttttttgagtcgggtttgaatcattgagattggcgcttttggtctatgggtctatgggagttgttattttcgttctattcatttatttagtcgaaatttgaatgagtcatgttggtttggtgtcggggatggggagggtgcagtcgggaaaaattagtagtaagtacaaacaaaggttttgaatgcatattattgagtataacattttata

SEQ ID NO: 138 - protein, 220 aa, Medicago sativa
MSTSTDHHEEEDVPAGDEEDTGAQIAPIIQLHEVAVSTGEEDEEAILDLKAKLYRFDKVGNQWKERGAGTVKFLKHKVTGKVRLVMRQSKTLKICANHLILPKMTVQEHAGNEKSCVWHAKDFADGELKDEFFCIRFASIENCRKFIETFQEIAESLNKEESKDASTAADLLENLSVEGKADAEKKDKEKSEEKTKEKETPEKESKEDTEKKVEEPASSA

SEQ ID NO: 139 - protein, 30 aa, Artificial sequence
  motif 2 of Zea mays
EEEDTGAQVAPIVRLEEVAVTTGEEDEDVL

SEQ ID NO: 140 - protein, 10 aa, Artificial sequence
  motif 3 of Zea mays
RQAKTLKICA

SEQ ID NO: 141 - protein, 5 aa, Artificial sequence
  motif 4 of Zea mays
NHLVA

SEQ ID NO: 142 - protein, 17 aa, Artificial sequence
  motif 5 of Zea mays
DKSCVWHAADFADGELK

SEQ ID NO: 143 - protein, 5 aa, Artificial sequence
  motif 6 of Zea mays
EIAES

SEQ ID NO: 144 - protein, 9 aa, Artificial sequence
  motif 7 of Zea mays
LAKLTVSEG

SEQ ID NO: 145 - protein, 30 aa, Artificial sequence
  motif 2 of Arabidopsis thaliana
EDEDTGAQVAPIVRLEEVAVTTGEEDEDTI

SEQ ID NO: 146 - protein, 10 aa, Artificial sequence
  motif 3 of Arabidopsis thaliana
RQSKTLKICA

SEQ ID NO: 147 - protein, 5 aa, Artificial sequence
  motif 4 of Arabidopsis thaliana
NHLVG

SEQ ID NO: 148 - protein, 17 aa, Artificial sequence
  motif 5 of Arabidopsis thaliana
DKSCVWHARDFSDGELK

SEQ ID NO: 149 - protein, 5 aa, Artificial sequence
  motif 6 of Arabidopsis thaliana
EVAES

SEQ ID NO: 150 - protein, 9 aa, Artificial sequence
  motif 7 of Arabidopsis thaliana
LEKLTVEEK

SEQ ID NO: 151 - DNA, 51 bp, Artificial sequence
  primer: prm06703
ggggacaagtttgtacaaaaaagcaggcttaaacaatggcggacaaggagc

SEQ ID NO: 152 - DNA, 50 bp, Artificial sequence
  primer: prm06704
ggggaccactttgtacaagaaagctgggtagtgcaaccacaccaactact

SEQ ID NO: 153 - DNA, 52 bp, Artificial sequence
  primer: prm06491
ggggacaagtttgtacaaaaaagcaggcttcacaatggcgagcattagcaac

SEQ ID NO: 154 - DNA, 49 bp, Artificial sequence
  primer: prm06492
ggggaccactttgtacaagaaagctgggtgcatcttaagctgagggaac

SEQ ID NO: 155 - DNA, 654 bp, Oryza sativa
cttctacatcggcttaggtgtagcaacacgactttattattattattattattattattattattttacaaaaatataaaatagatcagtccctcaccacaagtagagcaagttggtgagttattgtaaagttctacaaagctaatttaaaagttattgcattaacttatttcatattacaaacaagagtgtcaatggaacaatgaaaaccatatgacatactataattttgtttttattattgaaattatataattcaaagagaataaatccacatagccgtaaagttctacatgtggtgcattaccaaaatatatatagcttacaaaacatgacaagcttagtttgaaaaattgcaatccttatcacattgacacataaagtgagtgatgagtcataatattattttctttgctacccatcatgtatatatgatagccacaaagttactttgatgatgatatcaaagaacatttttaggtgcacctaacagaatatccaaataatatgactcacttagatcataatagagcatcaagtaaaactaacactctaaagcaaccgatgggaaagcatctataaatagacaagcacaatgaaaatcctcatcatccttcaccacaattcaaatattatagttgaagcatagtagta

SEQ ID NO: 156 - DNA, 1394 bp, Oryza sativa
atgcttgccgtgtcgccggcgatgtgccccgacattgaggaccgcgccgcggtggccggcgatgctggcatggaggtcgtcgggatgtcgtcggacgacatggatcagttcgacttctccgtcgatgacatagacttcggggacttcttcctgaggctggaggacggtgatgtgctcccggacctcgaggtcgacccggccgagatcttcaccgacttcgaggcaattgcgacgagtggaggcgaaggtgtgcaggaccaggaggtgcccaccgtcgagctcttggcgcctgcggacgacgtcggtgtgctggatccgtgcggcgatgtcgtcgtcggggaggagaacgcggcgtttgccggggctggagaggagaagggagggtgtaaccaggacgatgatgcgggggaagcgaatgtcgacgatggagccgcggcggttgaggccaagtcttcgtcgccgtcatcgacgacgtcgtcgtcgcaggaggctgagagccggcacaagtcatccagcaagagctcccatgggaagaagaaagcgaaggtggactggacgcctgagcttcaccggaggttcgtgcaggcggtggagcagctcggcatcgacaaggccgtgccgtcgaggatacttgagatcatggggatcgactctctcacccggcacaacatagccagccatcttcagaagtaccggtcacacagaaaacacatgattgcgagagaggcggaggcagcgagttggacccaacggcggcagatttacgccgccggtggaggtgctgtttgcgaagaggccggagtccaacgcgtggaccgtgccaaccattggcttccctcctcctccgccaccaccaccatcaccggctccgattcaacattttgctcgcccgttgcatgttggggccacccgacgatggacccgtcccgagttccagtgtggccaccgcggcacctcgttccccgtggcccggcgccaccatgggttccaccgccgccgccgtcggaccctgctttctggcaccacccttacatgagggggccagcacatgtgccaactcaagggacaccttgcatggcgatgcccatgccagctgcgagatttcctgctccaccggtgccaggagttgtcccgtgtccaatgtataggccattgactccaccagcactggcgagcaagaatcagcaggacgcacagcttcaactccaggttcaaccatcaagcgagagcatcgacgcagctatcggtgatgttttatcgaaaccgtggttgcctttgcctcttggactgaagccaccttcagtggacagtgtgatgggcgagctgcagaggcaaggcgtagcaaacgttcctccagcgtgtggatgatattacccagctttcttgtacaaagt

SEQ ID NO: 157 - protein, 455 aa, Oryza sativa
MLAVSPAMCPDIEDRAAVAGDAGMEVVGMSSDDMDQFDFSVDDIDFGDFFLRLEDGDVLPDLEVDPAEIFTDFEAIATSGGEGVQDQEVPTVELLAPADDVGVLDPCGDVVVGKENAAFAGAGEEKGGCNQDDDAGEANADDGAAAVEAKSSSPSSSTSSSQEAESRHKSSSKSSHGKKKAKVDWTPELHRRFVQAVEQLGIDKAVPSRILEIMGIDSLTRHNIASHLQKYRSHRKHMIAREAEAASWTQRRQIYAAGGGAVAKRPESNAWTVPTIGFPPPPPPPPSPAPMQHFARPLHVWGHPTMDPSRVPVWPPRHLVPRGPAPPWVPPPPPSDPAFWHHPYMRGPAHVPTQGTPCMAMPMPAARFPAPPVPGVVPCPMYRPLTPPALTSKNQQDAQLQLQVQPSSESIDAAIGDVLSKPWLPLPLGLKPPSVDSVMGELQRQGVANVPPACG

SEQ ID NO: 158 - DNA, 50 bp, artificial sequence
  primer: prm02251
ggggacaagtttgtacaaaaaagcaggcttcacaatgcttgccgtgtcgc

SEQ ID NO: 159 - DNA, 49 bp, artificial sequence
  primer: prm02252
ggggaccactttgtacaagaaagctgggtaatatcatccacacgctgga

SEQ ID NO: 160 - DNA, 2193 bp, Oryza sativa; identical to SEQ ID NO: 5

SEQ ID NO: 161 - protein, 21 aa, artificial sequence
  GARP consensus sequence 1
  VARIANT (1)..(1): /replace = "Arg"
  VARIANT (2)..(2): /replace = "Met" /replace = "Val" /replace = "Ala"
  VARIANT (3)..(3): /replace = "Lys" /replace = "Met"
  VARIANT (4)..(4): /replace = "Leu"
  VARIANT (5)..(5): /replace = "Asp"
  VARIANT (7)..(7): /replace = "Thr" /replace = "Ile" /replace = "Asn"
  VARIANT (8)..(8): /replace = "Ala" /replace = "Pro" /replace = "Ser" /replace = "Thr" /replace = "Cys" /replace = "His" /replace = "Gln" /replace = "Asp"
  VARIANT (9)..(9): /replace = "Gln" /replace = "Thr" /replace = "Asp" /replace = "Ser"
  VARIANT (11)..(11): /replace = "Asp"
  VARIANT (12)..(12): /replace = "Lys" /replace = "Gln" /replace = "Ala" /replace = "His" /replace = "Asp" /replace = "Glu" /replace = "Leu" /replace = "Ile"
  VARIANT (13)..(13): /replace = "Arg" /replace = "Gln" /replace = "Ser" /replace = "Cys" /replace = "Val" /replace = "Ala" /replace = "His"
  VARIANT (15)..(15): /replace = "Leu" /replace = "Ile"
  VARIANT (16)..(16): /replace = "Lys" /replace = "Gln" /replace = "Asp" /replace = "His" /replace = "Asp" /replace = "Asn" /replace = "Arg" /replace = "Ser"
  VARIANT (17)..(17): /replace = "Val" /replace = "Cys"
  VARIANT (18)..(18): /replace = "Gly" /replace = "Leu" /replace = "Ile"
  VARIANT (19)..(19): /replace = "Glu" /replace = "Ala" /replace = "Gln" /replace = "Asp" /replace = "Gly" /replace = "Thr" /replace = "Ile" /replace = "Lys" /replace = "His"
  VARIANT (20)..(20): /replace = "Glu" /replace = "His" /replace = "Leu" /replace = "Ile" /replace = "Met" /replace = "Lys" /replace = "Arg" /replace = "Ser"
KPRVVWSVELHRKFVAAVNQL

SEQ ID NO: 162 - protein, 3 aa, artificial sequence
  GARP consensus sequence 2
  VARIANT (2)..(2): /replace = "Val" /replace = "Leu" /replace = "Pro" /replace = "Ser" /replace = "His" /replace = "Gln" /replace = "Ala" /replace = "Gly"
  VARIANT (3)..(3): /replace = "Glu" /replace = "Lys" /replace = "His" /replace = "Gln" /replace = "Asn" /replace = "Ala"
GID

SEQ ID NO: 163 - protein, 11 aa, artificial sequence
  GARP consensus sequence 3
  VARIANT (1)..(1): /replace = "Thr"
  VARIANT (2)..(2): /replace = "Ile" /replace = "Tyr" /replace = "Phe" /replace = "Thr"
  VARIANT (4)..(4): /replace = "Ser"
  VARIANT (5)..(5): /replace = "Arg" /replace = "Thr" /replace = "Gln" /replace = "Leu" /replace = "Ser" /replace = "Gly" /replace = "Ala"
  VARIANT (6)..(6): /replace = "Val" /replace = "Leu"
  VARIANT (7)..(7): /replace = "Met" /replace = "Arg" /replace = "Lys"
  VARIANT (8)..(8): /replace = "Glu" /replace = " Gln" /replace = "Lys" /replace = "Arg" /replace = "Ser"
  VARIANT (9)..(9): /replace = "Ile" /replace = "Phe" /replace = "His" /replace = "Val" /replace = "Met" /replace = "Thr" /replace = "Arg" /replace = "Ala"
  VARIANT (10)..(10): /replace = "Ile" /replace = "Leu"
  VARIANT (11)..(11): /replace = "Lys" /replace = "Gly" /replace = "Ser" /replace = "Asp" /replace = "Gln" /replace = "Glu"
AVPKKILDLMN

SEQ ID NO: 164 - protein, 8 aa, artificial sequence
  GARP consensus sequence 4
  VARIANT (1)..(1): /replace = "Ile" /replace = "Met" /replace = "Thr" /replace = "Glu" /replace = "Leu" /replace = "Ser" /replace = "Asn"
  VARIANT (2)..(2): /replace = "Asp" /replace = "Gly" /replace = "Asn" /replace = "Tyr" /replace = "Lys" /replace = "His" /replace = "Gln" /replace = "Pro"
  VARIANT (3)..(3): /replace = "Gly" /replace = "Lys" /replace = "Thr" /replace = "Ser" /replace = "Cys" /replace = "Arg" /replace = "Asp"
  VARIANT (4)..(4): /replace = "Leu"
  VARIANT (5)..(5): /replace = "Asp" /replace = "Ala" /replace = "Ser"
  VARIANT (6)..(6): /replace = "Asn" /replace = "Ile" /replace = "Leu" /replace = "Val"
  VARIANT (7)..(7): /replace = "His" /replace = "Asp" /replace = "Ser" /replace = "Ala" /replace = "Tyr" /replace = "Phe"
  VARIANT (8)..(8): /replace = "Glu" /replace = "His"
VENITREN

SEQ ID NO: 165 - protein, 9 aa, artificial sequence
  GARP consensus sequence 5
  VARIANT (1)..(1): /replace = "Ile" /replace = "Leu"
  VARIANT (2)..(2): /replace = "Lys"
  VARIANT (7)..(7): /replace = "Met" /replace = "Ile"
  VARIANT (8)..(8): /replace = "Phe"
  VARIANT (9)..(9): /replace = "Val"
VASHLQKYR

SEQ ID NO: 166 - protein, 16 aa, artificial sequence
  Consensus sequence 6
  VARIANT (4)..(4): /replace = "Arg"
  VARIANT (6)..(6): /replace = "Met"
  VARIANT (7)..(7): /replace = "Ala" /replace = "Met" /replace = "Ile"
  VARIANT (11)..(11): /replace = "Gly" /replace = "Val"
  VARIANT (14)..(14): /replace = "Gly"
  VARIANT (15)..(15): /replace = "Asn" /replace = "Thr"
SHRKHLLAREAEAASW

SEQ ID NO: 167 - protein, 48 aa, artificial sequence
  GCT domain consensus sequence
  VARIANT (1)..(1): /replace = "Gln"
  VARIANT (2)..(2): /replace = "Leu"
  VARIANT (4)..(4): /replace = "Lys" /replace = "Ser"
  VARIANT (6)..(6): /replace = "Val"
  VARIANT (7)..(7): /replace = "Val" /replace = "Leu"
  VARIANT (13)..(13): /replace = "Glu"
  VARIANT (14)..(14): /replace = "Ala"
  VARIANT (15)..(15): /replace = "Leu"
  VARIANT (16)..(16): /replace = "Thr" /replace = "Ala" /replace = "Val"
  VARIANT (17)..(17): /replace = "Lys" /replace = "Arg"
  VARIANT (20)..(20): /replace = "Thr"
  VARIANT (22)..(22): /replace = "Pro"
  VARIANT (27)..(27): /replace = "Asn"
  VARIANT (30)..(30): /replace = "Ala"
  VARIANT (31)..(31): /replace = "Met" /replace = "Leu"
  VARIANT (32)..(32): /replace = "Glu" /replace = "Gly"
  VARIANT (33)..(33): /replace = "Ser"
  VARIANT (35)..(35): /replace = "Ile"
  VARIANT (36)..(36): /replace = "Ala" /replace = "Ser" /replace = "Gly"
  VARIANT (39)..(39): /replace = "His" /replace = "Glu"
  VARIANT (40)..(40): /replace = "Lys"
  VARIANT (41)..(41): /replace = "His"
  VARIANT (43)..(43): /replace = "Ile"
  VARIANT (44)..(44): /replace = "Asn" /replace = "Pro" /replace = "Ala"
  VARIANT (45)..(45): /replace = "Glu" /replace = "Thr" /replace = "Lys"
  VARIANT (46)..(46): /replace = "Ile"
  VARIANT (48)..(48): /replace = "Gln"
HPSNESIDAAIGDVISNPWLPLPLGLKPPSVDGVMTELQRQGVSNVPP

SEQ ID NO: 168 - DNA, 1542 bp, Oryza sativa
atgcttgaggtgtccacgctgcgaagccctaaggcggatcagcgggcgggcgtcggcggccaccatgtcgtcggcttcgtcccggcgccgccgtcgccggccgacgtcgccgacgaggtcgacgcgttcatcgtcgacgacagctgcctgctcgagtacatcgacttcagctgctgcgacgtgccgttcttccacgccgacgacggcgacatcctcccggacctcgaggtcgaccccacggagctcctcgccgagttcgccagctccccggacgacgagccgccgccgacgacgtcggctccgggccccggcgagccagctgctgctgcaggagccaaggaagacgtgaaggaagatggagccgccgccgccgccgccgccgccgccgctgactacgacgggtcgccgccgccaccgcgggggaagaagaagaaggacgacgaggaaaggtcgtcgtcgttgccggaggagaaagacgcgaagaacggcggcggcgacgaggtcctgagcgcggtgacgacggaggattcctcggccggtgccgccaagtcgtgctcgccgtcggcagagggccacagcaagaggaagccgtcgtcgtcgtcgtcatcggcggcggccggcaagaactctcacggcaagcgcaaggtgaaggtggactggacgccggagttgcaccggcggttcgtgcaggcggtggagcagctcgggatagacaaggccgtgccgtccaggatcctggagctcatgggcatcgagtgcctcactcgccacaacatcgccagccatctccagaaatatcggtcgcacaggaaacatctgatggcgagggaggcggaggcggcgagctggacgcagaagcggcagatgtacaccgccgccgccgccgccgccgcggtggcagccggcggcgggccaaggaaggacgccgccgccgccactgcggcggtggccccgtgggtcatgccgaccatcggtttccctccgccgcacgcggcggcgatggtgcctcccccgccgcaccctccaccgttctgccggccgccgctgcacgtgtggggccacccgaccgccggcgtcgagccgaccaccgcggcggcgccaccaccaccctcgccgcacgcgcagccgccgttgctgcccgtctggccgcgccacctggcgccgccgccgccgccgctgccggcggcgtgggcgcacggccaccagccggcgccggtggacccggcggcgtactggcagcaacagtataacttgcagaggtttcctgtaccgccggtgcctggaatggtgccgcaccccatgtacagaccgataccgccgccgtcaccgccgcaggggaataaactcgctgccttgcagcttcagcttgatgcccacccgtctaaggagagcatagacgcagccatcggagatgttttagtgaagccatggctgccgcttcccctcggcctcaagccaccgtcgctggacagcgtcatgtctgagctgcacaagcagggcatccccaaggtgccaccggcggcgagcggtgccgccggctga

SEQ ID NO: 169 - protein, 513 aa, Oryza sativa
MLEVSTLRSPKADQRAGVGGHHVVGFVPAPPSPADVADEVDAFIVDDSCLLEYIDFSCCDVPFFHADDGDILPDLEVDPTELLAEFASSPDDEPPPTTSAPGPGEPAAAAGAKEDVKEDGAAAAAAAAAADYDGSPPPPRGKKKKDDEERSSSLPEEKDAKNGGGDEVLSAVTTEDSSAGAAKSCSPSAEGHSKRKPSSSSSSAAAGKNSHGKRKVKVDWTPELHRRFVQAVEQLGIDKAVPSRILELMGIECLTRHNIASHLQKYRSHRKHLMAREAEAASWTQKRQMYTAAAAAAAVAAGGGPRKDAAAATAAVAPWVMPTIGFPPPHAAAMVPPPPHPPPFCRPPLHVWGHPTAGVEPTTAAAPPPPSPHAQPPLLPVWPRHLAPPPPPLPAAWAHGHQPAPVDPAAYWQQQYNLQRFPVPPVPGMVPHPMYRPIPPPSPPQGNKLAALQLQLDAHPSKESIDAAIGDVLVKPWLPLPLGLKPPSLDSVMSELHKQGIPKVPPAASGAAG

SEQ ID NO: 170 - DNA, 1263 bp, Arabidopsis thaliana
atgttagctctgtctccggcgacaagagatggttgcgacggagcgtcagagtttcttgatacgtcgtgtggattcacgattataaacccggaggaggaggaggagtttccggatttcgctgaccacggtgatcttcttgacatcattgacttcgacgatatattcggtgtggccggagatgtgcttcctgacttggagatcgaccctgagatcttatccggggatttctccaatcacatgaacgcttcttcaacgattactacgacgtcggataagactgatagtcaaggggagactactaagggtagttcggggaaaggtgaagaagtcgtaagcaaaagagacgatgttgcggcggagacggtgacttatgacggtgacagtgaccggaaaaggaagtattcctcttcagcttcttccaagaacaatcggatcagtaacaacgaagggaagagaaaggtgaaggtggattggacaccagagctacacaggagattcgtggaggcagtggaacagttaggagtggacaaagctgttccttctcgaattctggagcttatgggagtccattgtctcactcgtcacaacgttgctagtcacctccaaaaatataggtctcatcggaaacatttgctagctcgtgaggccgaagcggctaattggacacgcaaaaggcatatctatggagtagacaccggtgctaatcttaatggtcggactaaaaatggatggcttgcaccggcacccactctcgggtttccaccaccaccacccgtggctgttgcaccgccacctgtccaccaccatcattttaggcccctgcatgtgtggggacatcccacggttgatcagtccattatgccgcatgtgtggcccaaacacttacctccgccttctaccgccatgcctaatccgccgttttgggtctccgattctccctattggcatccaatgcataacgggacgactccgtatttaccgaccgtagctacgagatttagagcaccgccagttgccggaatcccgcatgctctgccgccgcatcacacgatgtacaaaccaaatcttggatttggtggtgctcgtcctccggtagacttacatccgtcaaaagagagcgtggatgcagccataggagatgtattgacgaggccatggctgccacttccgttgggattaaatccgccggctgttgacggtgttatgacagagcttcaccgtcacggtgtctctgaggttcctccgaccgcgtcttgtgcctga

SEQ ID NO: 171 - protein, 420 aa, Arabidopsis thaliana
MLALSPATRDGCDGASEFLDTSCGFTIINPEEEEEFPDFADHGDLLDIIDFDDIFGVAGDVLPDLEIDPEILSGDFSNHMNASSTITTTSDKTDSQGETTKGSSGKGEEVVSKRDDVAAETVTYDGDSDRKRKYSSSASSKNNRISNNEGKRKVKVDWTPELHRRFVEAVEQLGVDKAVPSRILELMGVHCLTRHNVASHLQKYRSHRKHLLAREAEAANWTRKRHIYGVDTGANLNGRTKNGWLAPAPTLGFPPPPPVAVAPPPVHHHHFRPLHVWGHPTVDQSIMPHVWPKHLPPPSTAMPNPPFWVSDSPYWHPMHNGTTPYLPTVATRFRAPPVAGIPHALPPHHTMYKPNLGFGGARPPVDLHPSKESVDAAIGDVLTRPWLPLPLGLNPPAVDGVMTELHRHGVSEVPPTASCA

SEQ ID NO: 172 - DNA, 1403 bp, Arabidopsis thaliana
gtatcattcttgttttctctaaatttttcaaaaaacctttagaattttcatttttttacgattccgatgttaactgtttctccggctccagtactcatcggaaacaactcaaaggatacttacatggcggcagatttcgcagattttacgacggaagacttgccggactttacgacggtcggggatttttccgatgatcttcttgatggaatcgattactacgacgatcttttcattggtttcgatggagacgatgttttgccggatttggagatagattcggagattcttggggaatattccggtagcggaagagatgaggaacaagaaatggagggtaacacttcgacggcatcggagacatcggagagagacgttggtgtgtgtaagcaagagggtggtggtggtggtgacggtggttttagggacaaaacggtgcgtcgaggcaaacgtaaagggaagaaaagtaaagattgtttatccgatgagaacgatattaagaaaaaacctaaggtggattggacgccggagttacaccggaaatttgtacaagcggtggagcaattaggggtagacaaggcggtgccgtctcgaatcttggaaattatgaacgttaaatctctcactcgtcacaacgttgctagccatcttcagaaatataggtcacatcggaaacatctactagcgcgtgaagcagaagctgccagctggaatctccggagacatgccacggtggcagtgcccggagtaggaggaggagggaagaagccgtggacagctcctgccttaggctatcctccacacgtggcaccaatgcatcatggtcacttcaggcctttgcacgtatggggtcatcctacgtggccaaaacacaagcctaatactccggcgtctgctcatcggacgtatccaatgccggccattgcggcggctccggcatcttggccaggtcatccaccgtactggcatcagcaaccactctatccacagggatatggtatggcatcatcgaatcattcaagcatcggtgttcccacaagacaattaggacccactaatcctcccatcgacattcatccctcgaatgagagcatagatgcagctattggggacgttatatcaaagccgtggctgccgcttcctttgggactgaaaccgccgtcggttgacggtgttatgacggagttacaacgtcaaggagtttctaatgttcctcctcttccttgagaaagatctccaaaatttgtcgaaatctcaaacttttaacttcatttttttggtatcttctatgtatttttgcaagggaaagacgataaatccttgttgcttgatcatatgtatttctctatatgagtgcatgtatcgaagttaagcaactttaatatatcgttataatcttcgat

SEQ ID NO: 173 - protein, 386 aa, Arabidopsis thaliana
MLTVSPAPVLIGNNSKDTYMAADFADFTTEDLPDFTTVGDFSDDLLDGIDYYDDLFIGFDGDDVLPDLEIDSEILGEYSGSGRDEEQEMEGNTSTASETSERDVGVCKQEGGGGGDGGFRDKTVRRGKRKGKKSKDCLSDENDIKKKPKVDWTPELHRKFVQAVEQLGVDKAVPSRILEIMNVKSLTRHNVASHLQKYRSHRKHLLAREAEAASWNLRRHATVAVPGVGGGGKKPWTAPALGYPPHVAPMHHGHFRPLHVWGHPTWPKHKPNTPASAHRTYPMPAIAAAPASWPGHPPYWHQQPLYPQGYGMASSNHSSIGVPTRQLGPTNPPIDIHPSNESIDAAIGDVISKPWLPLPLGLKPPSVDGVMTELQRQGVSNVPPLP

SEQ ID NO: 174 - DNA, 2833 bp, Physcomitrella patens
ttctaggaggtcagcttggtccaagtccgaatcgcatccacgcgataggatatgtcgatccaaatcacacatttttacactccccagaaggaggaaaagaagttttcgaaaccagtagtgaggaatcatagtttcgttttccgaaacctacaaattcatcatactcatttcggtaacaaatgctacttaaaagacatgtcaggaaaacatataaagtgacagtgattctgcatcaacgtgacagggatccatcagtggagaatgaataaaaaaaacaattagagaatggtgagtagaatcctcagcaaaattacgttttatttattaatattatacttaaaagtaaaacaggatgattcatgatgtcatcaccgaggttgtggagagattcaaaaagaggatggaggctacttttatggggagggtgggttcactttatgcagtaaagtagtagatctctatttaaaggggggaaagaggatgtctgctgaaggccagtgcagtggatgaacgcaggcgctcgtctatgtttcatccatccatccattgtgtcgatttagaggccaccatggcttctgagggtgaggggagaggatagatagcatagaggggggggggtggagcaggcaagggcaggagtgagattgtggtggtggtgtgattaggcgatggagatatggcgatggacatggcgaggatagaagtcgagcctcttgtcgaagtccacaacaacaccaacaacttgcttgtgcattgcgtgctcgatgctttgccggattcttcaccttgcttgaaatccagtgagacttcgtttgaagctgtggttgtaaaggaggacgaggagggagggaggccgctgtttggcaagcctgagctccaccctgcctcaccctcgagtgatacagcggctgctgcaaatggtgaattcgctagatgcttgaattttgtgacggaggctgattgtggagatgtaggcgtacaatgttttgaggattttggtacgttgccggactgtggtgaggcggggataagcagggaagagggtggaggtagagacggggagcaggtggagttgttagagtctatgagcctcgatggtagtaggaattcggagaatttagagctaggggagctcggcgaattgttgcaggggtcggagacgctggattcggttcctgggaacgaggttggggaggaggaggcgctgctgttggcgaaagcggcaaaggcgacgggcgttgttgtttcggcctccgatagtggtgaatgtagcagtgtcgataggaaggaaaatcaacaaagtccgaaatcatgtaaaagtgccgcaccggggaagaagaaggcgaaggtcgattggacgccggagcttcatcggcgctttgtccacgcggtggaacagcttggagtggagaaagcttttccctcgcgcatactagaactgatgggagtacaatgtctcacccggcacaatatcgccagtcatttgcagaagtatcgctcgcatcgtcgccatcttgcagccagggaagccgaggcagcatcctggactcatcgtcgagcgtacacccagatgccctggtctcgaagttcacggcgcgatggccttccttatcttgtacccttacacacccctcacatacaacctcgcccatccatggtcatggcaatgcaaccacagcttcagacgcagcacaccccggtgtcgacgcctcttaaggtgtgggggtatcctacagtagatcattcaagtgtacacatgtggcagcaacctgcagtggcgaccccatcgtattggcaagcccccgatggctcttactggcagcatcctgccaccaattatgatgcgtattcagctcgcgcttgttatccccatcccatgcgagtttcgttaggcactacgcatgctggctctccaatgatggctccaggatttcctgacgagagctactacggtgaagatgttcttgcagctaccatgtatctttgtaaccaatcatatgacagtgaattaggacgagctgcgggcgtcgctgcgtgcagtaaaccaccggagacgcatttatcgaaggaggttcttgatgcagccatcggagaagcgcttgctaacccttggactcccccgcccctgggactgaagccgccgtctatggagggagtaatcgcagagcttcagcggcagggaatcaacactgtgcctccctctacctgttagctttagttgtttgctgtagagaatatttcattctacgattcgcattccaatgaccgctgaccgctggtgtcgcttggctggtgttcatctcgaggaatcaatttggtgaaattttggttatgtcacggtaggggggtctattttctccagagttcctccggagaggtgtatgaaaggatcgattttctttcttcttttttttttttcttttttttcttttttttttcttttttttttccttcgaataaggctgccttggtggtgtttcttcttagttttttaacgagggataccttatcatatctgtcaagatatgtcactgaacgttgctgcatgtagacttacgtttatggtaacactttctcaatgccattaaaaaccgaaaccagttcttctgattgtttcattggaagtatcctgacaacctgtcagcatctgttggcatgtggtttcctcacccacacccttctttcagttggttttgaatctgcatctactgactgttaaggttttacgtgtatcaagtgtacgatttttccacaagataatttctcaacaactctgctttcgaagcacctttcttctccaccaatcaagagtggtgggaagatggaccaaggt

SEQ ID NO: 175 - protein, 511 aa, Physcomitrella patens
MAMDMARIEVEPLVEVHNNTNNLLVHCVLDALPDSSPCLKSSETSFEAVVVKEDEEGGRPLFGKPELHPASPSSDTAAAANGEFARCLNFVTEADCGDVGVQCFEDFGTLPDCGEAGISREEGGGRDGEQVELLESMSLDGSRNSENLELGELGELLQGSETLDSVPGNEVGEEEALLLAKAAKATGVVVSASDSGECSSVDRKENQQSPKSCKSAAPGKKKAKVDWTPELHRRFVHAVEQLGVEKAFPSRILELMGVQCLTRHNIASHLQKYRSHRRHLAAREAEAASWTHRRAYTQMPWSRSSRRDGLPYLVPLHTPHIQPRPSMVMAMQPQLQTQHTPVSTPLKVWGYPTVDHSSVHMWQQPAVATPSYWQAPDGSYWQHPATNYDAYSARACYPHPMRVSLGTTHAGSPMMAPGFPDESYYGEDVLAATMYLCNQSYDSELGRAAGVAACSKPPETHLSKEVLDAAIGEALANPWTPPPLGLKPPSMEGVIAELQRQGINTVPPSTC

SEQ ID NO: 176 - DNA, 2270 bp, Physcomitrella patens
ggtggtggtggtagaaggcgatggagatatggcgatggacatggcgaggatagatgaatcaaccgccgtcgaggtcaactcgctttcgcttgtgcattgcgtgttggatgggttgcccgattcgccttgcttgaaatccagcccgacgtcattcgaggaggctgtggcggaagggaggtcggtgttcggggacgaggaggacatcatcaacaacagcaacgaccaggacaactcgtcctcgtgcggtgcagtggtcaccacccacgaagatttcgccgagtgcttgaattttgtgacggaggcggagtgtggagatgtgggtgtgcggtgtttcgaggattttgacaagctgccggactgcggcgacgagggggagactagcaaagcggaggaggaggggtgtgtacgaataggcggaggaggggagcagggcgagctgttagagtctgtgagccttgactgtagtaggaattcggagaatttagagcttcgggatctcggggaattgtgggaagggtcggaacggcctgactcagtgccagggaacgaggtgggtgaggaggaggcgttgctgttggcggaggcggccaaggcgacgggcgatgtcgtgtcggcctcggatagtggagaatgtagcagtgtcgataggaaggacaatcaagccagtccgaaatccagtaaaaatgcagcgccggggaagaagaaggccaaggtggactggacgcctgagcttcaccggcgcttcgtccatgcagtggagcagctgggtgtggagaaagcctatccatcgcgtatcctagaactgatgggcgtgcaatgcttgactcggcacaacatcgccagtcacttgcagaagtaccggtcccaccgtcgccacctcgcagctcgagaagcagaggccgcgtcctggacgcatcgtcgcacatacactcaggctccctggcctcgtagctcacggcgcgatggcctcccttatcttgtacctatacacacccctcacatacaacctcggccttccatggccatggcaatgcaaccgcagcttcagacgccgcatcatccgatatccactcctctcaaggtctggggctaccccacagtagatcattcaaatgtacatatgtggcagcaacctgctgtggcgaccccatcttactggcaagctgccgatggctcatactggcaacatcccgcgaccggttacgacgctttctcagctcgtgcctgctactcgcatcccatgcagcgagttcctgtaacgaccacgcatgcgggtttaccaattgtggcgccaggatttcctgacgagagctgctactacggcgacgacatgcttgcaggctccatgtatctatgtaaccaatcatatgatagtgaaataggacgagctgcgggtgttgctgcgtgcagcaagccgatagagacgcatttgtccaaagaggtgttggatgcggccattggcgaagctctcgccaatccctggactcccccacctctgggtctgaagccaccatccatggagggcgtcattgcagagcttcagcggcaggggatcaacactgtgcctccttcaacttgttagctctcgacgatgtttttttcttcctcttcctcttcctcttcttctagagagcaatttttctttctacgactcatattccaatgaccgctgaccgctggtgtcgctggtgtcgctggtgttcatcccgaggaactaatttggtgaaaattcggttaagttgcgatagaggtctgatctccggaaggtttattttttgtcttctggagaggttgtataagaggttcccctgttttgcaataaggcttccttgatgagattttcctttatttttcccctgattctttctccttccattttagtttcacaagaaggcatcttctggccatggcggtcacgatgtgtcactttgatgctgcatgtggaccttttttcttatatctgtagtagcactcctccatttcatgaggaataaagatcaaacatcacacatcatcactcgaattcttcatctcctcctcctcccttttccactaggatgccttctattgcattggttgtcatgtgactcagtctttctcttacacgcactttaactcgctggatgtctcactttctgactgttcaaggtgaggtctgataggttcgagacgggattgcttgcgatgactcaccatctcctaatttggaaccaacattcctcctcaacctatcaactctcactcaaacttgcattgtgtgagcattggtc

SEQ ID NO: 177 - protein, 517 aa, Physcomitrella patens
MAMDMARIDESTAVEVNSLSLVHCVLDGLPDSPCLKSSPTSFEEAVAEGRSVFGDEEDIINNSNDQDNSSSCGAVVTTHEDFAECLNFVTEAECGDVGVRCFEDFDKLPDCGDEGETSKAEEEGCVRIGGGGEQGELLESVSLDCSRNSENLELRDLGELWEGSERPDSVPGNEVGEEEALLLAEAAKATGDVVSASDSGECSSVDRKDNQASPKSSKNAAPGKKKAKVDWTPELHRRFVHAVEQLGVEKAYPSRILELMGVQCLTRHNIASHLQKYRSHRRHLAAREAEAASWTHRRTYTQAPWPRSSRRDGLPYLVPIHTPHIQPRPSMAMAMQPQLQTPHHPISTPLKVWGYPTVDHSNVHMWQQPAVATPSYWQAADGSYWQHPATGYDAFSARACYSHPMQRVPVTTTHAGLPIVAPGFPDESCYYGDDMLAGSMYLCNQSYDSEIGRAAGVAACSKPIETHLSKEVLDAAIGEALANPWTPPPLGLKPPSMEGVIAELQRQGINTVPPSTC

SEQ ID NO: 178 - DNA, 1843 bp, Zea mays
aaacagcgaaacagtgcagagacaagctacaacaacctaccctaacaggccattccttccactgcacttcattcgatcctgagctatagctggctgcctgagctcgctccaagaagtgtatctatagtatagacactaggcttcgtgtggcgtgctcgagatatgcttgcagtgtcgccgtcgccggtgcggtgtgccgatgcggaggagtgcggcggaggaggcgccagcaaggaaatggaggagaccgccgtcgggcctgtgtccgactcggacctggatttcgacttcacggtcgacgacatagacttcggggacttcttcctcaggctagacgacggggatgacgcgctgccgggcctcgaggtcgaccctgccgagatcgtcttcgctgacttcgaggcaatcgccaccgccggcggcgatggcggcgtcacggaccaggaggtgcccagtgtcctgccctttgcggacgcggcgcacataggcgccgtggatccgtgttgtggtgtccttggcgaggacaacgacgcagcgtgcgcagacgtggaagaagggaaaggggagtgcgaccatgccgacgaggtagcagccgccggtaataataatagcgactccggtgaggccggctgtggaggagcctttgccggcgaaaaatcaccgtcgtcgacggcatcgtcgtcgcaggaggctgagagccggcgcaaggtgtccaagaagcactcccaagggaagaagaaagcaaaggtggattggacgccggagcttcaccggagattcgttcaggcggtggaggagctgggcatcgacaaggcggtgccgtccaggatcctcgagatcatggggatcgactccctcacgcggcataacatagccagccatctgcagaagtaccgttcccacaggaagcacatgcttgcgagggaggtggaggcagcgacgtggacgacgcaccggcggccgatgtacgctgcccccagcggcgccgtgaagaggcccgactctaacgcgtggaccgtgccgaccatcggtttccctccgccggcggggacccctcctcgtccggtgcagcacttcgggaggccactgcacgtctggggccatccgagtccgacgccagcggtggagtcaccccgggtgccaatgtggcctcggcatctcgccccccgcgccccgccgccgccgccgtgggctccgccaccgccagctgacccggcgtcgttctggcaccatgcttacatgagggggcctgctgcccatatgccagaccaggtggcggtgactccatgcgtggcagtgccaatggcagcagcgcgtttccctgctccacacgtgaggggttctttgccatggccacctccgatgtacagacctctcgttcctccagcactcgcaggcaagagccagcaagacgcgctgtttcagctacagatacagccatcaagcgagagcatagatgcagcaataggtgatgtcttaacgaagccgtggctgccgctgcccctcggactgaagcccccttcggtagacagtgtcatgggcgagctgcagaggcaaggcgtagcgaatgtgccgcaagcttgtggatgatccccggggctgcatagctgctagctcgtccctgcacgcagtgcaacaaaaggaatttgtcgacatgccttttatgttttgaattcccgtgaaccgtttatggagcactctcaactcgttcagggtcagatgaacagaacattataggagtacattctttgaggtttcaggtttgagggaaatcaacctgagtgcatccaagtacagtgtactgccacagtgccacgtcggaaaatgaagtcttgacccgaat

SEQ ID NO: 179 - protein, 475 aa, Zea mays
MLAVSPSPVRCADAEECGGGGASKEMEETAVGPVSDSDLDFDFTVDDIDFGDFFLRLDDGDDALPGLEVDPAEIVFADFEAIATAGGDGGVTDQEVPSVLPFADAAHIGAVDPCCGVLGEDNDAACADVEEGKGECDHADEVAAAGNNNSDSGEAGCGGAFAGEKSPSSTASSSQEAESRRKVSKKHSQGKKKAKVDWTPELHRRFVQAVEELGIDKAVPSRILEIMGIDSLTRHNIASHLQKYRSHRKHMLAREVEAATWTTHRRPMYAAPSGAVKRPDSNAWTVPTIGFPPPAGTPPRPVQHFGRPLHVWGHPSPTPAVESPRVPMWPRHLAPRAPPPPPWAPPPPADPASFWHHAYMRGPAAHMPDQVAVTPCVAVPMAAARFPAPHVRGSLPWPPPMYRPLVPPALAGKSQQDALFQLQIQPSSESIDAAIGDVLTKPWLPLPLGLKPPSVDSVMGELQRQGVANVPQACG

SEQ ID NO: 180 - DNA, 2192 bp, Zea mays
ctcatcttctcttcttcttcccccagtcctccccccctttcccctcttcggcctctctcgctcagctcactcttcattaagcgagctcacgtcgttcctcccttcttcttcttcttatccgttgttcaattcgttcagctagccggccagagatcgagcatcatctccatcatcgattcatccatctcatctttctcttcttctattctatgtcgtcgtcgtcccagattagatcgaagctgctagcagtctatccagtctctagctagctagctagatcaagcccgcagactatacaatataatacaagctagctacgtgcttattattgctttattagtctagaataatcttgatatatacgatcgaacatatatctcgatctccaccgatacacacccggccctatccatgcttgaggtgtcgacgctgcgcggccctactagcagcggcagcaaggcggagcagcactgcggcggcggcggcggcttcgtcggcgaccaccatgtggtgttcccgacgtccggcgactgcttcgccatggtggacgacaacctcctggactacatcgacttcagctgcgacgtgcccttcttcgacgctgacggggacatcctccccgacctggaggtagacaccacggagctcctcgccgagttctcgtccacccctcctgcggacgacctgctggcagtggcagtattcggcgccgacgaccagccggcggcggcagtagcacaagagaagccgtcgtcgtcgttggagcaaacatgtggtgacgacaaaggtgtagcagtagccgccgccagaagaaagctgcagacgacgacgacgacgacgacgacggaggaggaggattcttctcctgccgggtccggggccaacaagtcgtcggcgtcggcagagggccacagcagcaagaagaagtcggcgggcaagaactccaacggcggcaagcgcaaggtgaaggtggactggacgccggagctgcaccggcggttcgtgcaggcggtggagcagctgggcatcgacaaggccgtgccgtccaggatcctggagatcatgggcacggactgcctcacaaggcacaacattgccagccacctccagaagtaccggtcgcacagaaagcacctgatggcgcgggaggcggaggccgccacctgggcgcagaagcgccacatgtacgcgccgccagctccaaggacgacgacgacgacggacgccgccaggccgccgtgggtggtgccgacgaccatcgggttcccgccgccgcgcttctgccgcccgctgcacgtgtggggccacccgccgccgcacgccgccgcggctgaagcagcagcggcgactcccatgctgcccgtgtggccgcgtcacctggcgccgccccggcacctggcgccgtgggcgcacccgacgccggtggacccggcgttctggcaccagcagtacagcgctgccaggaaatggggcccacaggcagccgccgtgacgcaagggacgccatgcgtgccgctgccgaggtttccggtgcctcaccccatctacagcagaccggcgatggtacctccgccgccaagcaccaccaagctagctcaactgcatctggagctccaagcgcacccgtccaaggagagcatcgacgcagccatcggagatgttttagtgaagccatggctgccgcttccactggggctcaagccgccgtcgctcgacagcgtcatgtcggagctgcacaagcaaggcgtaccaaaaatcccaccggcggctgccaccaccaccggcgccaccggatgacatactatctcgtcgacaatacatgcatgtacaatagacggatgtctagtagtatagtagattgctgctagctagctagccgctagagtgtagtagcatatgcatgccttttttttcttcttctttttttgcccttattattaagctggctaatagcgattgagatggagcttgacacagatctgctagctagctatttgagggtttctcttgtatgctacctattgctgctgcttgctgctgagacaagtaatgtacgtacgcctgtgcaaacgacacatcggattgtattgtattactagttatatgaacaacaacaataataataggcacatgcatgcctgcctagtatgtgagctgctagctagctacatgcatgttgcgcattcctttcc

SEQ ID NO: 181 - protein, 461 aa, Zea mays
MLEVSTLRGPTSSGSKAEQHCGGGGGFVGDHHVVFPTSGDCFAMVDDNLLDYIDFSCDVPFFDADGDILPDLEVDTTELLAEFSSTPPADDLLAVAVFGADDQPAAAVAQEKPSSSLEQTCGDDKGVAVAAARRKLQTTTTTTTTEEEDSSPAGSGANKSSASAEGHSSKKKSAGKNSNGGKRKVKVDWTPELHRRFVQAVEQLGIDKAVPSRILEIMGTDCLTRHNIASHLQKYRSHRKHLMAREAEAATWAQKRHMYAPPAPRTTTTTDAARPPWVVPTTIGFPPPRFCRPLHVWGHPPPHAAAAEAAAATPMLPVWPRHLAPPRHLAPWAHPTPVDPAFWHQQYSAARKWGPQAAAVTQGTPCVPLPRFPVPHPIYSRPAMVPPPPSTTKLAQLHLELQAHPSKESIDAAIGDVLVKPWLPLPLGLKPPSLDSVMSELHKQGVPKIPPAAATTTGATG

SEQ ID NO: 182 - DNA, 1221 bp, Triticum aestivum
gaattgggcacgaggaccgccccattgtgccggacgcataatcgccgtcgtcgacaacgtcgtcgtccacggaggccgagagccgccacaagtcatcaagcaagaactcccacggaaagaagaaagccaaggtggactggacgccggagctgcaccggaggttcgtgcaggccgtagagcagctcggcatcgacaaggcagtgccgtctaggattttggagatcatggggatcaactcactcactcggcacaacatagcaagccatttgcagaagtaccggtctcaccggaagcacatgattgcgcgggaggcggaggcggcgagctggacccaacgacgacagatgtacgccgccggcgggccggccgcggccgtgaagaggcaggactcgaacatgtggaccgtgccaaccatcggcttcgcgccggcgcaccctcctcctcctcctccccctccttcaccggcagccatgcagcactacgctcggccgttgcacgtctggggtcaccctacgatggactcgccccggatgccgatgtggccgaggcacacaatatcccgcgccccgatgccggcgtgggctcccccgccgccgccgccgtctgacccggctttctggcaccacccttacatgagggggcccgcagcgtatatgccgacccatgggactccttgcatggcaatgccgatgacaccgaaatttcctgctgcacccgtgcccgtggccatgccgtgcccagtctatgcgtccccctccccggcaccagcgctggcgagcaagagccaacaagattcgcagctccagctccaagcacaaccatcaaatgagagcatagacgcggccattggtgacgttttatccaaaccgtggctgccgctgccgctggggctgaagcccccttcgttgggcagcgtcatgggcgagcttgaaaggcaaggcgtggccaatgtgccccaagcctgcgggtgagcgttggagggtgcatccgcgtgcactccatgcatgactgctgctccgttcgatggagcagctagcagcaacaacaacatcgtcgacatgtctttgttcctttgaacgttttgtggatctctctctctctctcttggtcaacttgtgcataatttcgatcaagagaaacatcgttattttgagttcactcccgagacacatttttgttacacctaaactttaagtttgcggtaacagcagcatcaacaac

SEQ ID NO: 183 - protein, 248 aa, Triticum aestivum
MGINSLTRHNIASHLQKYRSHRKHMIAREAEAASWTQRRQMYAAGGPAAAVKRQDSNMWTVPTIGFAPAHPPPPPPPPSPAAMQHYARPLHVWGHPTMDSPRMPMWPRHTISRAPMPAWAPPPPPPSDPAFWHHPYMRGPAAYMPTHGTPCMAMPMTPKFPAAPVPVAMPCPVYASPSPAPALASKSQQDSQLQLQAQPSNESIDAAIGDVLSKPWLPLPLGLKPPSLGSVMGELERQGVANVPQACG

SEQ ID NO: 184 - DNA, 839 bp, Allium cepa
tgcaaatattgttcaacgtatataaagacaatttagtatgctaacaatctctccccttgaaagttctaatccagatgcaaaagacgagggagattttgtactagaagacatcagctttgatgacttgttcgtaggattcgatgaacttcccgaccttgaaattgacccttgtgatatatttgctgatttttctttcaatagtagcgaggagggagatggaaataacaagggttcaacatcggaagaaaatgatgtacagcataaaagagacggatactataaggagcactcaggtaaagaagagacggaggttgtgagtgcaagaacaagggaggatgaaaagaagccgccttcatctaaatcagagaatgttaaaagcctaaagtcatcaggcaaaaagtcatctcagtctaaaaagaaagctaaggtggactggactccggagcttcatcggagatttgttcaggcagtggagcaacttggggtagacaaagcagtaccatccaggattttagagctcatgggaattgattgtctcacaagacataatattgcaagccatttacagaaatatcggtcgcacagaaagcatttgctagcaagagaagcagaagcagcaagctggagtcacagacgtcagttgtacgtgagcagcactaacaatggaaagaggaggaggaaaaacaatgaacatgaaacctagttgggccccacagtcacagcccattggtggatttcctcccaacaatgcatcatccctcaacatcagaacttcagaacctttgcacgtctggggcccatccacaggcagtggagcatcctcagctagttccagtctg

SEQ ID NO: 185 - protein, 221 aa, Allium cepa
MLTISPLESSNPDAKDEGDFVLEDISFDDLFVGFDELPDLEIDPCDIFADFSFNSSEEGDGNNKGSTSEENDVQHKRDGYYKEHSGKEETEVVSARTREDEKKPPSSKSENVKSLKSSGKKSSQSKKKAKVDWTPELHRRFVQAVEQLGVDKAVPSRILELMGIDCLTRHNIASHLQKYRSHRKHLLAREAEAASWSHRRQLYVSSTNNGKRRRKNNEHET

SEQ ID NO: 186 - DNA, 454 bp, Hordeum vulgare
catcgtgggcgatgaggtttgcagcgcggtgacgacggacgattcttccgctgcggtcgggtccgagaacagcaagtcgtcggcgtcggcagagggccacagcaagaggacgtcggcagccgcagcgaccaagagctcccacggcaggcggaaggtgaaggtggactggacgccggagttgcaccggcggttcgtgcaggcgggggagcagctggggctggacaaggcggtgccgtcgcggatcctggagctcatgggcaacgagtaccgtctcacgcgccacaacatcgccagccatctccagaagtaccggtcacacaggaagcacctgatggcgagggagggcgaggcgggtagctggacgccgcagccgcaaatgtgctggggtgcgaaggtggtgagggtggggcgggctctgacgttgtaggggttatatagcggggtggcggcgggg

SEQ ID NO: 187 - protein, 144 aa, Hordeum vulgare
SLSIVGDEVCSAVTTDDSSAAVGSENSKSSASAEGHSKRTSAAAATKSSHGRRKVKVDWTPELHRRFVQAGEQLGLDKAVPSRILELMGNEYRLTRHNIASHLQKYRSHRKHLMAREGEAGSWTPQPQMCWGAKVVRVGRALTL

SEQ ID NO: 188 - DNA, 811 bp, Sorghum bicolor
gcacgaggcttgaaattccctccgccgccgccgccgccgccgcctcctcctcctccttctcctcatccgatgcagcacttcggaaggccgctgcatgcctggggccatccgacgccaacggtggagtcaccccgggtgccaatgtggcctcggcatctcgtcccccgcaccccgccgccgccgtgggctcctccgccgccatctgacccggcgttctggcaccatgcttacatgagggggcctgcacacatgccgggccaggtgactccctgcgtggcagtgccaatgccagctgcgcgtttccctgctccacccgtgaggggtgctttgccatgtccacctccaatgtacagacctctcgttcctccaacactcgatacgcagtttcagctacagacacagccatcaagtgagagcatagatgcagcaataggtgatgttttaacgaaaccgtggctgccactgcccctgggactgaagcccccttcagtagacagtgtcatgggcgagctgcagaggcaaggtgtggcaaatgtgccaccagcttgtggatgatccccggggctccatagctagctgcttgtccctgcagtccaacaaaaagaatttgtcgacatgccttttctgtttcaaattttcatgaaccatttatggaccactctctcttagttaacttgttcagggtcagagagcaaaacagtacatcctttcaggtttgagggaaatcaacctgagtacatccaagtacaatgtgccatgacggaataatgaagtcttggccttggcccgaataatcagtagctgccatctc

SEQ ID NO: 189 - protein, 184 aa, Sorghum bicolor
ARGLKFPPPPPPPPPPPPPSPHPMQHFGRPLHAWGHPTPTVESPRVPMWPRHLVPRTPPPPWAPPPPSDPAFWHHAYMRGPAHMPGQVTPCVAVPMPAARFPAPPVRGALPCPPPMYRPLVPPTLDTQFQLQTQPSSESIDAAIGDVLTKPWLPLPLGLKPPSVDSVMGELQRQGVANVPPACG

SEQ ID NO: 190 - DNA, 593 bp, Saccharum officinarum
  misc_feature (521)..(521): n is a, c, g, or t
  misc_feature (524)..(524): n is a, c, g, or t
  misc_feature (534)..(534): n is a, c, g, or t
catcgacaaggccgtgccgtcccggatcctcgagataatgggcatggattgcctcacaagacacaacattgccagccacctccagaagtaccggtcgcacagaaagcacctgatggcgcgggaggcggaggccgccacctgggcgcagaagcggcacatgtacgcggcggccggcggagtagccccgaggacggacgcaccacacggcagccggccgtgggtggtgccgaccatcgggttcccgccgccggcgcccccgcccttctgccggccgctgcacgtgtggggccacccgccccacgccgccgccgctgaagccgctgctgcggtggcggcgactccgactccgatgctgcccgtgtggccgcggcacctggcgccgccccggccgctgccgccgtgggcgcacccgcacccgccggccgtggacccggcgttctggcaccagcagtacaacgcggccaggaaatggggtccacaggcaaccgcagtgacgcaagggacgccggcgtgcgtgccgncgnccgccgccgncatgctgccgaggttttcccgggttggccccggggggggggggggaaaaaaaatttttt

SEQ ID NO: 191 - protein, 197 aa, Saccharum officinarum
  UNSURE (174)..(175): Xaa can be any naturally occurring amino acid
  UNSURE (178)..(178): Xaa can be any naturally occurring amino acid
IDKAVPSRILEIMGMDCLTRHNIASHLQKYRSHRKHLMAREAEAATWAQKRHMYAAAGGVAPRTDAPHGSRPWVVPTIGFPPPAPPPFCRPLHVWGHPPHAAAAEAAAAVAATPTPMLPVWPRHLAPPRPLPPWAHPHPPAVDPAFWHQQYNAARKWGPQATAVTQGTPACVPXXAAXMLPRFSRVGPGGGGGKKIF

SEQ ID NO: 192 - DNA, 1816 bp, Oryza sativa
ggcaactaacaatacctcgcacctagtcaccaccgcaccaaccgcgcgcgaccggccccccgtcagtcgaaagctgagcctgagcgagcaactgatgccgctagctatagctgctgcctgcagcacgcagcgcccgtaacctaacgtatcatttacttccattgcactgcacatcctgtgagttcgttgtctgagtgagagctggacgtgctgcaccgagctcctggccgagatgcttgccgtgtcgccggcgatgtgccccgacattgaggaccgcgccgcggtggccggcgatgctggcatggaggtcgtcgggatgtcgtcggacgacatggatcagttcgacttctccgtcgatgacatagacttcggggacttcttcctgaggctggaggacggtgatgtgctcccggacctcgaggtcgacccggccgagatcttcaccgacttcgaggcaatcgcgacgagtggaggcgaaggtgtgcaggaccaggaggtgcccaccgtcgagctcttggcgcctgcggacgacgtcggtgtgctggatccgtgcggcgatgtcgtcgtcggggaggagaacgcggcgtttgccggggctggagaggagaaggtagggtgtaaccaggacgatgatgcgggggaagcgaatgtcgacgatggagccgcggcggttgaggccaagtcttcgtcgccgtcatcgacgacgtcgtcgtcgcaggaggctgagagccggcacaagtcatccagcaagagctcccatgggaagaagaaagcgaaggtggactggacgcctgagcttcaccggaggttcgtgcaggcggtggagcagctcggcatcgacaaggccgtgccgtcgaggatacttgagatcatggggatcgactctctcacccggcacaacatagccagccatcttcagaagtaccggtcacacagaaaacacatgattgcgagagaggcggaggcagcgagttggacccaacggcggcagatttacgccgccggtggaggtgctgttgcgaagaggccggagtccaacgcgtggaccgtgccaaccattggcttccctcctcctccgccaccaccaccatcaccggctccgattcaacattttgctcgcccgttgcatgtttggggccacccgacgatggacccgtcccgagttccagtgtggccaccgcggcacctcgttccccgtggcccggcgccaccatgggttccaccgccgccgccgtcggaccctgctttctggcaccacccttacatgagggggccagcacatgtgccaactcaagggacaccttgcatggcgatgcccatgccagctgcgagatttcctgctccaccggtgccaggagttgtcccgtgtccaatgtataggccattgactccaccagcactggcgagcaagaatcagcaggacgcacagcttcaactccaggttcaaccatcaagcgagagcatcgacgcagctatcggtgatgttttatcgaaaccgtggttgcctttgcctcttggactgaagccaccttcagtggacagtgtgatgggcgagctgcagaggcaaggcgtagcaaacgttcctccagcgtgtggatgatatttgcatgatagattgatggttccgttactgactgattgcttatctggtcagttcaccaaaaaatgggaaaattcgccgacatgtccttttatttttcttttggcctagcgtttcttggacatctcgtttaatttttaacttgtgcagagttcgaaagacatctttgtttcgactccgggagaaattaacctgcgtattgtaaatgtaaaatgt

SEQ ID NO: 193 - protein, 455 aa, Oryza sativa
MLAVSPAMCPDIEDRAAVAGDAGMEVVGMSSDDMDQFDFSVDDIDFGDFFLRLEDGDVLPDLEVDPAEIFTDFEAIATSGGEGVQDQEVPTVELLAPADDVGVLDPCGDVVVGEENAAFAGAGEEKVGCNQDDDAGEANVDDGAAAVEAKSSSPSSTTSSSQEAESRHKSSSKSSHGKKKAKVDWTPELHRRFVQAVEQLGIDKAVPSRILEIMGIDSLTRHNIASHLQKYRSHRKHMIAREAEAASWTQRRQIYAAGGGAVAKRPESNAWTVPTIGFPPPPPPPPSPAPIQHFARPLHVWGHPTMDPSRVPVWPPRHLVPRGPAPPWVPPPPPSDPAFWHHPYMRGPAHVPTQGTPCMAMPMPAARFPAPPVPGVVPCPMYRPLTPPALASKNQQDAQLQLQVQPSSESIDAAIGDVLSKPWLPLPLGLKPPSVDSVMGELQRQGVANVPPACG

SEQ ID NO: 194 - DNA, 1096 bp, Oryza sativa
tgtgctaaggcatccatgctactgcagagtgtcccacctgcagttttggttcgatttttgagggaacatcgttctgaatgggcggattataacttcgatgcatattcagcttcatctctgaagacaagctcatgttcacttcctgggttgcggcctatgagattttctgggagccagatcattatgccacttgctcacacggtggagaatgaagagattttagaagttgtccgtcttgaaggacaagcacttacacatgatgatggtcttatgtctagagatattcacctgcttcagctttgcactggaatagatgagaaatcaatgggatcctgcttccagcttgtctttgcaccaatcgatgagcttttccctgatgatgctccgttaatatcttcaggctttcgtgttataccgctggacatgaaaacagatggtacacctgctggtagaacattagatttggcatctagccttgaggttggttcaactgcacagcccacaggggatgcatctatggatgactgtaatctacgatcagtgctgacaattgcctttcagttcccttatgaaatgcatctccaagacagcgttgcaactatggcccggcaatatgtccgcagtattgttttctctgttcagagagtatcaatggctgtttctccttctcggtctggcttgaatgctgggcagaagataatttcaggcttccctgaagccccaacgctagctcgttggatttgccaaagctaccagttccatttgggggtggagttacttaggcaggcagatgatgctggggaagcactattgaaaatgctatgggattacgaagacgctattttgtgctgttctttcaaggaaaagcctgtatttacttttgccaacgagatgggactaaacatgctagaaacatctctcgtcgctctccaagatctctcactggacaagatatttgatgaagccggtaggaaggccctatacaacgagatcccgaaattgatggaacagggttacgtgtacctgcctggtggagtgtgcttgtccgggatggggcgccatgtttctttcgagcaagctgtagcatggaaggtgc

SEQ ID NO: 195 - protein, 365 aa, Oryza sativa
CAKASMLLQSVPPAVLVRFLREHRSEWADYNFDAYSASSLKTSSCSLPGLRPMRFSGSQIIMPLAHTVENEEILEVVRLEGQALTHDDGLMSRDIHLLQLCTGIDEKSMGSCFQLVSAPIDELFPDDAPLISSGFRVIPLDMKTDGTPAGRTLDLASSLEVGSTAQPTGDASMDDCNLRSVLTIAFQFPYEMHLQDSVATMARQYVRSIVSSVQRVSMAISPSRSGLNAGQKIISGFPEAPTLARWICQSYQFHLGVELLRQADDAGEALLKMLWDYEDAILCCSFKEKPVFTFANEMGLNMLETSLVALQDLSLDKIFDEAGRKALYNEIPKLMEQGYVYLPGGVCLSGMGRHVSFEQAVAWKV

SEQ ID NO: 196 - DNA, 1395 bp, Oryza sativa
gctcaagagacaagcggggaggttgtatacgctttggggaggcaacctgctgttttgcggacatttagtcagaggttgagtagaggcttcaatgatgctataagtggtttcaatgatgatggttggtctgtcatgggtggggatggcattgaagatgtgatcattgcttgcaatgcaaagaaggttaggaatactagcacttcggccaatgcttttgtaactccaggaggtgttatatgtgctaaggcatccatgctactgcagagtgtcccacctgcagttttggttcgatttttgagggaacatcgttctgaatgggcggattataacttcgatgcatattcagcttcatctctgaagacaagctcatgttcacttcctgggttgcggcctatgagattttctgggagccagatcattatgccacttgctcacacggtggagaatgaggagattttagaagttgtccgtcttgaaggacaagcacttacacatgatgatggtcttatgtctagagatattcacctgcttcagctttgcactggaatagatgagaaatcaatgggatcctgcttccagcttgtctctgcaccaatcgatgagcttttccctgatgatgctccgttaatatcttcaggctttcgtgttataccgctggacatgaaaacagatggtacacctgctggtagaacattagatttggcatctagccttgaagttggttcaactgcacagcccacaggggatgcatctatggatgactgtaatctacgatcagtgctgacaattgcctttcagttcccttatgaaatgcatctccaagacagcgttgcaactatggcccggcaatatgtccgcagtattgtttcctctgttcagagagtatcaatggctatttctccttctcggtctggcttgaatgctgggcagaagataatttcaggcttccctgaagccccaacgctagctcgttggatttgccaaagctaccagttccatttgggggtggagttacttaggcaggcagatgatgctggggaagcactattgaaaatgctatgggattacgaagacgctattttgtgctgttctttcaaggaaaagcctgtgtttacttttgccaacgagatgggactaaacatgctagaaacatctctcgtcgctctccaagatctctcactggacaagatatttgatgaagccggtaggaaggccctatacaacgagatcccgaaattgatggaacagggttacgtgtacctgcctggtggagtgtgcttgtccgggatggggcgccatgtttctttcgagcaagctgtagcatggaaggtgctcggagaagacaacaatgtgcactgcctcgccttctgcttcgtcaactggtccttcgtgtga

SEQ ID NO: 197 - protein, 464 aa, Oryza sativa
AQETSGEVVYALGRQPAVLRTFSQRLSRGFNDAISGFNDDGWSVMGGDGIEDVIIACNAKKVRNTSTSANAFVTPGGVICAKASMLLQSVPPAVLVRFLREHRSEWADYNFDAYSASSLKTSSCSLPGLRPMRFSGSQIIMPLAHTVENEEILEVVRLEGQALTHDDGLMSRDIHLLQLCTGIDEKSMGSCFQLVSAPIDELFPDDAPLISSGFRVIPLDMKTDGTPAGRTLDLASSLEVGSTAQPTGDASMDDCNLRSVLTIAFQFPYEMHLQDSVATMARQYVRSIVSSVQRVSMAISPSRSGLNAGQKIISGFPEAPTLARWICQSYQFHLGVELLRQADDAGEALLKMLWDYEDAILCCSFKEKPVFTFANEMGLNMLETSLVALQDLSLDKIFDEAGRKALYNEIPKLMEQGYVYLPGGVCLSGMGRHVSFEQAVAWKVLGEDNNVHCLAFCFVNWSFV

SEQ ID NO: 198 - DNA, 3000 bp, Oryza sativa
gacgtcaggttatttttttttctcctcgtctcctgacgatttcgcttttgctcgaaatctcccaggtttgttgttgttgtgttgaaggcggagaagaggggaggctttggtggtggtggaggaggaggatggcggcggcggtggcgatgcggagcggcagcggcagcgacggcggcggcggcgggtacgacaaggccgggatggactccggcaagtacgtgcggtacacgccggagcaggtggaggcgctggagagggtgtacgccgagtgccccaagcccagctcctcccgccgccagcagctgctccgcgactgtcccatcctcgccaacatcgagcccaagcagatcaaggtctggttccagaacagaaggtgccgagataagcagcggaaggaggcatcaaggcttcaggccgtgaaccgaaaattgacggcgatgaataagcttctcatggaggagaatgagcgtcttcagaagcaggtctcccagctggtccatgagaacgcgtacatgaagcagcaacttcagaatccgtcattgggcaatgatacaagctgtgaatcaaatgtgaccactcctcagaaccctctgagagatgcaagtaacccgtctggactccttacaattgcggaggagaccctgacagagttcctctccaaggctacagggactgctgttgattgggtgccaatgcctgggatgaagcctggtccggattcgtttggtattgtggccgtttcacatggttgccgtggtgttgctgcccgtgcctgtggtttggtgaatctagaaccaacaaagatcgtggagatcttaaaagaccgcccatcttggttccgtgattgtcgaagtcttgaagtcttcacaatgtttccagctggaaatggtggcacgatcgaacttgtttacatgcagatgtatgctcctactactttggttcctgcacgagatttttggacacttagatacacaactacaatggaggatggcagccttgtggtctgtgagagatcattgagtggttctggaggtggtccaagtacagcctccgcacagcaatttgtaagagctgagatgcttcctagcggctatctagtgcgcccatgcgagggtggtggctccatcgtgcatattgtggaccatctggatcttgaggcttggagtgttccagaagtgcttcggccactctacgagtcatctagggtagttgctcagaaaatgactactgcagcactacggcacatcagacaaattgctcaagagacaagcggggaggttgtatacgctttggggaggcaacctgctgttttgcggacatttagtcagaggttgagtagaggcttcaatgatgctataagtggtttcagtgatgatggttggtctgtcatgggtggggatggcattgaagatgtgatcattgcttgcaatgcaaagaaggttaggaatactagcacttcggccaatgcttttgtaactccaggaggtgttatatgtgctaaggcatccatgctactgcagagtgtcccacctgcagttttggttcgatttttgagggaacatcgttctgaatgggcggattataacttcgatgcatattcagcttcatctctgaagacaagctcatgttcacttcctgggttgcggcctatgagattttctgggagccagatcattatgccacttgctcacacggtggagaatgaggagattttagaagttgtccgtcttgaaggacaagcacttacacatgatgatggtcttatgtctagagatattcacctgcttcagctttgcactggaatagatgagaaatcaatgggatcctgcttccagcttgtctctgcaccaatcgatgagcttttccctgatgatgctccgttaatatcttcaggctttcgtgttataccgctggacatgaaaacagatggtacacctgctggtagaacattagatttggcatctagccttgaagttggttcaactgcacagcccacaggggatgcatctatggatgactgtaatctacgatcagtgctgacaattgcctttcagttcccttatgaaatgcatctccaagacagcgttgcaactatggcccggcaatatgtccgcagtattgtttcctctgttcagagagtatcaatggctatttctccttctcggtctggcttgaatgctgggcagaagataatttcaggcttccctgaagccccaacgctagctcgttggatttgccaaagctaccagttccatttgggggtggagttacttaggcaggcagatgatgctggggaagcactattgaaaatgctatgggattacgaagacgctattttgtgctgttctttcaaggaaaagcctgtgtttacttttgccaacgagatgggactaaacatgctagaaacatctctcgtcgctctccaagatctctcactggacaagatatttgatgaagccggtaggaaggccctatacaacgagatcccgaaattgatggaacagggttacgtgtacctgcctggtggagtgtgcttgtccgggatggggcgccatgtttctttcgagcaagctgtagcatggaaggtgctcggagaagacaacaatgtgcactgcctcgccttctgcttcgtcaactggtccttcgtgtgacccaaaatccaatccaccatgctcgcagtcatcgtcgttgtcgtcagatctccattttttgcaatctctgtagaagagaggacaccaaaccaaccacaaacctgtcagctgttagctaatgattctactagcttttctagatctttgaaggcaaaatgctgccggtgcctgtaaagagtgtgtgcgtgcgtgtgtaaatttgggcgcgttttgcactaatttgatctggggtaaggaggcgctggctgctgctgtgctgtagtttggtaaaagttgagtacgctaaccttggatggtctcgaactgtatgatgaaattcctagcagtaaaatttcaacttggatccgcg

SEQ ID NO: 199 - protein, 840 aa, Oryza sativa
MAAAVAMRSGSGSDGGGGGYDKAGMDSGKYVRYTPEQVEALERVYAECPKPSSSRRQQLLRDCPILANIEPKQIKVWFQNRRCRDKQRKEASRLQAVNRKLTAMNKLLMEENERLQKQVSQLVHENAYMKQQLQNPSLGNDTSCESNVTTPQNPLRDASNPSGLLTIAEETLTEFLSKATGTAVDWVPMPGMKPGPDSFGIVAVSHGCRGVAARACGLVNLEPTKIVEILKDRPSWFRDCRSLEVFTMFPAGNGGTIELVYMQMYAPTTLVPARDFWTLRYTTTMEDGSLVVCERSLSGSGGGPSTASAQQFVRAEMLPSGYLVRPCEGGGSIVHIVDHLDLEAWSVPEVLRPLYESSRVVAQKMTTAALRHIRQIAQETSGEVVYALGRQPAVLRTFSQRLSRGFNDAISGFNDDGWSVMGGDGIEDVIIACNAKKVRNTSTSANAFVTPGGVICAKASMLLQSVPPAVLVRFLREHRSEWADYNFDAYSASSLKTSSCSLPGLRPMRFSGSQIIMPLAHTVENEEILEVVRLEGQALTHDDGLMSRDIHLLQLCTGIDEKSMGSCFQLVSAPIDELFPDDAPLISSGFRVIPLDMKTDGTPAGRTLDLASSLEVGSTAQPTGDASMDDCNLRSVLTIAFQFPYEMHLQDSVATMARQYVRSIVSSVQRVSMAISPSRSGLNAGQKIISGFPEAPTLARWICQSYQFHLGVELLRQADDAGEALLKMLWDYEDAILCCSFKEKPVFTFANEMGLNMLETSLVALQDLSLDKIFDEAGRKALYNEIPKLMEQGYVYLPGGVCLSGMGRHVSFEQAVAWKVLGEDNNVHCLAFCFVNWSFV

SEQ ID NO: 200 - DNA, 3252 bp, Oryza sativa
ctctctcccgtgctgctctcccttctcctctcctcaattaccacgccgcagccgcagccccccaaccctagctagtacggcgggcgacctgagggggtagctgcctacctctatacctgctatctccgttcgatccgggtcgggctcgtgctgctgggggcgggggcaatcaatcggcgagctcggtgatccatggccgtggctgtggggtggctgtgagggtgcccccggcggcgctcccctccgcgcctgccggcgagggggctcggactgaagggatctaggcgagctgaaaattgaagtgcaggcaaggagataagagcagcgtccaaattgtgagtacttcattagcaggaggtagtggttgtgcttgcttggctcctttgcaatttggctttggcgaggtagcaatggctgcggcagtggcaatgcgagggagtagcagtgatggaggtggctatgataaggtttccgggatggactccggtaaatatgtgcgctacacgcctgagcaggtggaggcgcttgagcgggtgtacgccgattgccccaagccaacctcctcccgcaggcagcaactgctgcgtgagtgccccatacttgctaacattgagcccaagcagatcaaggtctggttccagaacagaaggtgccgggataagcagcggaaggagtcttcacggcttcaggctgtcaacaggaaattgacggcaatgaacaagctacttatggaagagaatgagcgactccagaagcaggtctcccaattggttcatgagaatgcccacatgcgacagcagctgcagaatactccgctggcaaatgatacaagctgtgaatcaaatgtgactacccctcaaaaccctttaagggatgcaagtaacccctctgggctcctttcaattgcagaggagaccttgacagagttcctctcaaaggctactggtacagctattgattgggtccagatgcctgggatgaagcctggtccggattcggttggtattgtggccatttcacatggttgccgtggtgttgctgcccgtgcctgtggtttggtgaacctagaaccaacaaaagtggtagagatattgaaagatcgtccatcttggttccgtgattgtcgaaacctggaagtctttacaatgattccagcaggaaatggaggaacggttgaacttgtctacacacagttgtatgctccaacaactttagttcctgcacgagatttttggacgttacggtacacaaccacaatggaagatggcagtcttgtggtctgtgagagatctttaagtggttcagggggcggtccaagtgctgcctctgctcagcaatatgtgagagcggaaatgcttccaagtggatacctggttcgcccatgtgaaggtgggggatcaattgtgcacatagtggaccatctggatcttgaggcatggagtgttcctgaggtgcttcggccactctatgaatcttcaagggtagtcgctcagaaaatgactactgcggcactccggcacatcagacaaattgctcaagaaacaagtggggaagtggtgtatgccttggggaggcaaccagcagtgctacggacttttagtcaaaggctgagcagaggctttaacgatgccattagtggtttcaatgatgatgggtggtctataatgggcggagacggtgttgaagatgtagttattgcttgcaactcaactaagaaaattaggagtaacagcaatgctggcatcgcctttggagcccccggaggtattatatgtgctaaggcatcaatgttactgcagagtgttcctccagcagtactggttcgatttctgagggagcatagatctgaatgggccgattacaatattgatgcatatttggcttcaactctgaaaacaagtgcatgttcacttactgggttgcgacccatgagattttctgggagccaaatcatcattccacttgctcacacagttgagaatgaggagattcttgaagttgttcgccttgagggtcaacctcttactcatgatgaagctcttctttcaagggatatccacctgcttcagctctgcactggaatagacgagaagtctgtgggatcctcctttcagcttgtgtttgcaccgattgatgatttcccagatgaaactccattgatttcttctggcttccgtgttataccacttgatatgaaaacagatggtgcatcctctggtaggacattagatttggcatctagtcttgaagtaggttcagcaacagctcaagcctccggagatgcatctgcagatgattgtaacttgcgatctgttctgacgatcgcttttcaattcccttacgagttgcatctccaagacagtgttgcagctatggctcgccaatatgtccgtagcattgtttctgctgtgcaaagagtgtcaatggctatctctccctctcaaactggtctaaatgccggacagaggataatctctggtttccctgaagcagcaacccttgctcgatgggtttgccagagctaccattaccatctaggggtagagttacttagtcaatcagatggagatgcagaacaattgttgaagatgctatggcattaccaagatgctattttgtgctgctcattcaaggaaaaaccggtgtttacatttgccaacaaagcaggactggacatgctagaaacttcccttgtcgccttacaggacctcacattggacaggatctttgatgagcctggaaaagaagcattgttctcaaacattcccaaattgatggagcagggccatgtctacctgccatcaggcgtgtgcatgtcaggaatgggtcggcatgtttctttcgatcaggccgtggcttggaaagtgcttgccgaggatagcaatgttcactgcctggccttctgtttcgtcaactggtcctttgtgtgaccatcccacatccactgcgaagtgaagattcatttttgcttgttcaagactgttttgcactagatctagacctgagaatctagtagtatttgcgaaatttctcgcttatgtaaatgtaatctcgctcccattccatcaagtacccaagtacaaggcagtggccaagtggttttagttgtagggggatcggagcaatcctgacggttgggtacttgggttccttccagcaatgtaaaatcggatcctgtagggcgtcgaaaactgcattggcaagattcttcgaaatgcagaccaaatttagctagtacatcgtaactttggc

SEQ ID NO: 201 - protein, 839 aa, Oryza sativa
MAAAVAMRGSSSDGGGYDKVSGMDSGKYVRYTPEQVEALERVYADCPKPTSSRRQQLLRECPILANIEPKQIKVWFQNRRCRDKQRKESSRLQAVNRKLTAMNKLLMEENERLQKQVSQLVHENAHMRQQLQNTPLANDTSCESNVTTPQNPLRDASNPSGLLSIAEETLTEFLSKATGTAIDWVQMPGMKPGPDSVGIVAISHGCRGVAARACGLVNLEPTKVVEILKDRPSWFRDCRNLEVFTMIPAGNGGTVELVYTQLYAPTTLVPARDFWTLRYTTTMEDGSLVVCERSLSGSGGGPSAASAQQYVRAEMLPSGYLVRPCEGGGSIVHIVDHLDLEAWSVPEVLRPLYESSRVVAQKMTTAALRHIRQIAQETSGEVVYALGRQPAVLRTFSQRLSRGFNDAISGFNDDGWSIMGGDGVEDVVIACNSTKKIRSNSNAGIAFGAPGGIICAKASMLLQSVPPAVLVRFLREHRSEWADYNIDAYLASTLKTSACSLTGLRPMRFSGSQIIIPLAHTVENEEILEVVRLEGQPLTHDEALLSRDIHLLQLCTGIDEKSVGSSFQLVFAPIDDFPDETPLISSGFRVIPLDMKTDGASSGRTLDLASSLEVGSATAQASGDASADDCNLRSVLTIAFQFPYELHLQDSVAAMARQYVRSIVSAVQRVSMAISPSQTGLNAGQRIISGFPEAATLARWVCQSYHYHLGVELLSQSDGDAEQLLKMLWHYQDAILCCSFKEKPVFTFANKAGLDMLETSLVALQDLTLDRIFDEPGKEALFSNIPKLMEQGHVYLPSGVCMSGMGRHVSFDQAVAWKVLAEDSNVHCLAFCFVNWSFV

SEQ ID NO: 202 - DNA, 3169 bp, Arabidopsis thaliana
agagtcttcaaaacttttgcagcttcaattgtacctgggtttcttcttcattgttcctaaggtttctgtgtccttcaattcttctgatataatgcttctttaagagagttgacatcatcactttcttggggtactcttctctgtttctccccagaaaatccaactctgtaattttgggtctttattctgtttttctctttgaagaatctttaaaattctcagatcttctgaatctctcttctttaaaactttttttaactttattttttgtactcgcttctttgccttcatttttctcgtatccacatgtcgttggtctttcgctacaagccacgaccgtagaatcttcttttgtctgaaaagaattacaatttacgtttctcttacgatacgacggactttccgaagaaattaatttaaagagaaaagaagaagaagccaaagaagaagaagaagctagaagaaacagtaaagtttgagactttttttgagggtcgagctaaaatggagatggcggtggctaaccaccgtgagagaagcagtgacagtatgaatagacatttagatagtagcggtaagtacgttaggtacacagctgagcaagtcgaggctcttgagcgtgtctacgctgagtgtcctaagcctagctctctccgtcgacaacaattgatccgtgaatgttccattttggccaatattgagcctaagcagatcaaagtctggtttcagaaccgcaggtgtcgagataagcagaggaaagaggcgtcgaggctccagagcgtaaaccggaagctctctgcgatgaataaactgttgatggaggagaatgataggttgcagaagcaggtttctcagcttgtctgcgaaaatggatatatgaaacagcagctaactactgttgttaacgatccaagctgtgaatctgtggtcacaactcctcagcattcgcttagagatgcgaatagtcctgctggattgctctcaatcgcagaggagactttggcagagttcctatccaaggctacaggaactgctgttgattgggttcagatgcctgggatgaagcctggtccggattcggttggcatctttgccatttcgcaaagatgcaatggagtggcagctcgagcctgtggtcttgttagcttagaacctatgaagattgcagagatcctcaaagatcggccatcttggttccgtgactgtaggagccttgaagttttcactatgttcccggctggtaatggtggcacaatcgagcttgtttatatgcagacgtatgcaccaacgactctggctcctgcccgcgatttctggaccctgagatacacaacgagcctcgacaatgggagttttgtggtttgtgagaggtcgctatctggctctggagctgggcctaatgctgcttcagcttctcagtttgtgagagcagaaatgctttctagtgggtatttaataaggccttgtgatggtggtggttctattattcacattgtcgatcaccttaatcttgaggcttggagtgttccggatgtgcttcgacccctttatgagtcatccaaagtcgttgcacaaaaaatgaccatttccgcgttgcggtatatcaggcaattagcccaagagtctaatggtgaagtagtgtatggattaggaaggcagcctgctgttcttagaacctttagccaaagattaagcaggggcttcaatgatgcggttaatgggtttggtgacgacgggtggtctacgatgcattgtgatggagcggaagatattatcgttgctattaactctacaaagcatttgaataatatttctaattctctttcgttccttggaggcgtgctctgtgccaaggcttcaatgcttctccaaaatgttcctcctgcggttttgatccggttccttagagagcatcgatctgagtgggctgatttcaatgttgatgcatattccgctgctacacttaaagctggtagctttgcttatccgggaatgagaccaacaagattcactgggagtcagatcataatgccactaggacatacaattgaacacgaagaaatgctagaagttgttagactggaaggtcattctcttgctcaagaagatgcatttatgtcacgggatgtccatctccttcagatttgtaccgggattgacgagaatgccgttggagcttgttctgaactgatatttgctccgattaatgagatgttcccggatgatgctccacttgttccctctggattccgagtcatacccgttgatgctaaaacgggagatgtacaagatctgttaaccgctaatcaccgtacactagacttaacttctagccttgaagtcggtccatcacctgagaatgcttctggaaactctttttctagctcaagctcgagatgtattctcactatcgcgtttcaattcccttttgaaaacaacttgcaagaaaatgttgctggtatggcttgtcagtatgtgaggagcgtgatctcatcagttcaacgtgttgcaatggcgatctcaccgtctgggataagcccgagtctgggctccaaattgtccccaggatctcctgaagctgttactcttgctcagtggatctctcaaagttacagtcatcacttaggctcggagttgctgacgattgattcacttggaagcgacgactcggtactaaaacttctatgggatcaccaagatgccatcctgtgttgctcattaaagccacagccagtgttcatgtttgcgaaccaagctggtctagacatgctagagacaacacttgtagccttacaagatataacactcgaaaagatattcgatgaatcgggtcgtaaggctatctgttcggacttcgccaagctaatgcaacagggatttgcttgcttgccttcaggaatctgtgtgtcaacgatgggaagacatgtgagttatgaacaagctgttgcttggaaagtgtttgctgcatctgaagaaaacaacaacaatctgcattgtcttgccttctcctttgtaaactggtcttttgtgtgattcgattgacagaaaaagactaatttaaatttacgttagagaactcaaatttttggttgttgtttaggtgtctctgttttgttttttaaaattattttgatcaaatgttactcactttcttctttcaaaaaaaaaa

SEQ ID NO: 203 - protein, 842 aa, Arabidopsis thaliana
MEMAVANHRERSSDSMNRHLDSSGKYVRYTAEQVEALERVYAECPKPSSLRRQQLIRECSILANIEPKQIKVWFQNRRCRDKQRKEASRLQSVNRKLSAMNKLLMEENDRLQKQVSQLVCENGYMKQQLTTVVNDPSCESVVTTPQHSLRDANSPAGLLSIAEETLAEFLSKATGTAVDWVQMPGMKPGPDSVGIFAISQRCNGVAARACGLVSLEPMKIAEILKDRPSWFRDCRSLEVFTMFPAGNGGTIELVYMQTYAPTTLAPARDFWTLRYTTSLDNGSFVVCERSLSGSGAGPNAASASQFVRAEMLSSGYLIRPCDGGGSIIHIVDHLNLEAWSVPDVLRPLYESSKVVAQKMTISALRYIRQLAQESNGEVVYGLGRQPAVLRTFSQRLSRGFNDAVNGFGDDGWSTMHCDGAEDIIVAINSTKHLNNISNSLSFLGGVLCAKASMLLQNVPPAVLIRFLREHRSEWADFNVDAYSAATLKAGSFAYPGMRPTRFTGSQIIMPLGHTIEHEEMLEVVRLEGHSLAQEDAFMSRDVHLLQICTGIDENAVGACSELIFAPINEMFPDDAPLVPSGFRVIPVDAKTGDVQDLLTANHRTLDLTSSLEVGPSPENASGNSFSSSSSRCILTIAFQFPFENNLQENVAGMACQYVRSVISSVQRVAMAISPSGISPSLGSKLSPGSPEAVTLAQWISQSYSHHLGSELLTIDSLGSDDSVLKLLWDHQDAILCCSLKPQPVFMFANQAGLDMLETTLVALQDITLEKIFDESGRKAICSDFAKLMQQGFACLPSGICVSTMGRHVSYEQAVAWKVFAASEENNNNLHCLAFSFVNWSFV

SEQ ID NO: 204 - DNA, 2700 bp, Zea mays
gagagctaagagcaacaaggcgacgagatttgtgtggctacgattttgcgttgccgacggaacatgggaacaatggttgcagcggtggcgttgcgagggggaagcagcgatagcggaggatttgataaggttcccgggatggactcgggaaaatacgtgcgctacaccccggagcaagttgaggtgctcgagcggctctacatagattgccccaagccaagctcctcacggcggcagcaactgctgcgcgagtgtcctatactctccaacattgagccaaagcagatcaaggtctggttccagaaccggaggtgccgcgataagcagcggaaggagtcttcgcggcttcaggctgtgaacagaaagttgacggcaatgaacaagcttctaatggaagagaatgagcggcttcagaagcaagtctctcagttggttcatgaaaacgcgcacatgcggcagcagctgcagaatacttcattggccaatgacacaagctgtgaatcaaatgtcactacccctccaaaccctataagggacgcaagtaacccttctggactccttgcgattgcagaggagaccttcacagagttcctctcaaaggctactgggacagctattgattgggtccagatgcctgggatgaagcctggtccggattcagttggtatcgtggccatttcgcatggttgccgtggcgttgctgcccgcgcctgtggtttggtgaatctagaaccaacaaaaggcatagagatcttgaaagatcgtccctcttggttccgtgattgccgaagtcttgaagtgtttacaaggtttccagctggaaatgggggaacaattgaacttatttacatgcagatgtatgccccaacaactttagtccctgcacgtgatttttggacactacgatacacgacaacaatggaagatggcagccttgtggtctgtgagagatccttgagtggttctggtggtggtccaaatgcagcctctacacaacaatttgttagggctgagatgcttccaagtgggtatttagttcgcccatgcgaaggtggaggatcaattgtgcatatagtggaccatctagatctcgaagcatggagtgttcctgaagtgcttcgaccactgtatgagtcttctagagttgttgctcagaaaatgactactgtggcactgcgccaccttagacaaattgctcaagaaacaagtggagaagtagtgtacgccttgggaaggcaacctgcagtcctacggacctttagtcaaagactaagcagggggtttaatgatgccattagcggtttcaatgatgatggctggtctgtaatggggggagatggcattgaagacgttgttattgcttgcaactcaaccaagaaaattaggaataccagcaatgctgggattacatttggagccccaggaggcattatttgtgcgaaggcatccatgttactgcagagcgtcccaccggcagtactggtacgatttctgagggagcatagatctgaatgggctgattacaatattgatgcgtatttggcttcatcattgaagaccagtgcgtgctcacttcctgggttgcgacccatgagattttctgaggggcagatgatcatgccacttgctcacacagttgagaacgaggagattcttgaagttgtccgccttgaaggtcagcctcttactcatgatgaagctcttctttcaagggacatccaccttctccagctttgcactggaatagatgagaaatctgtgggttcctccttccagcttgtgtttgcaccaattgatgagcatttcccagatgatgctccattgatttcttctggctttcgtgtcataccacttgatgtgaaaacagatggtgtatcctctggtaggacgctagatttggcatctagtcttgatgtgggctctgctgcaccccaagcctcaggggatgcatctccagatgactgcagtttgagatctgtgctgacaatcgcctttcaattcccgtatgagatgcaccttcaggacagcgttgcagcaatggcccgtcaatatgttcgtagtgtcatttctgctgtgcaaagagtgtcgatggctatatctccctcccaatctggtctaaatgctgggcataggatgctttctggcttccctgaagctgccacacttgctagatgggtttgccagagttatcactaccatctaggtatggaattacttaatcaatcagatggagctggtgaagcattgttgaaaatgctctggcatcatccagatgctgttctgtgctgctcctttaaggagaaacctatgtttacgtttgcaaacaaggcagggctggacatgttagaaacatctcttgttgccctgcaagacctgacgctagacaagatcttcgacgagtcaggaaggaaagcactattctcagacatctcgaaactaatggaacagggctacgcgtacctgccgtcaggcgtgtgcatgtcaggaatgggccgccatgtttctttcgaccaagctgtagcgtggaaggtgctcggcgaggatagcaacatccactgcctggcgttctgcttcgtcaactggtccttcgtgtgactgacgcccaacccgtcgggtggttatggcgagctgacccttttttgtatggaaaatcatcagctgtgacaaaaggcatatgttgcatgcactagttgaagaaac

SEQ ID NO: 205 - protein, 843 aa, Zea mays
MGTMVAAVALRGGSSDSGGFDKVPGMDSGKYVRYTPEQVEVLERLYIDCPKPSSSRRQQLLRECPILSNIEPKQIKVWFQNRRCRDKQRKESSRLQAVNRKLTAMNKLLMEENERLQKQVSQLVHENAHMRQQLQNTSLANDTSCESNVTTPPNPIRDASNPSGLLAIAEETFTEFLSKATGTAIDWVQMPGMKPGPDSVGIVAISHGCRGVAARACGLVNLEPTKGIEILKDRPSWFRDCRSLEVFTRFPAGNGGTIELIYMQMYAPTTLVPARDFWTLRYTTTMEDGSLVVCERSLSGSGGGPNAASTQQFVRAEMLPSGYLVRPCEGGGSIVHIVDHLDLEAWSVPEVLRPLYESSRVVAQKMTTVALRHLRQIAQETSGEVVYALGRQPAVLRTFSQRLSRGFNDAISGFNDDGWSVMGGDGIEDVVIACNSTKKIRNTSNAGITFGAPGGIICAKASMLLQSVPPAVLVRFLREHRSEWADYNIDAYLASSLKTSACSLPGLRPMRFSEGQMIMPLAHTVENEEILEVVRLEGQPLTHDEALLSRDIHLLQLCTGIDEKSVGSSFQLVFAPIDEHFPDDAPLISSGFRVIPLDVKTDGVSSGRTLDLASSLDVGSAAPQASGDASPDDCSLRSVLTIAFQFPYEMHLQDSVAAMARQYVRSVISAVQRVSMAISPSQSGLNAGHRMLSGFPEAATLARWVCQSYHYHLGMELLNQSDGAGEALLKMLWHHPDAVLCCSFKEKPMFTFANKAGLDMLETSLVALQDLTLDKIFDESGRKALFSDISKLMEQGYAYLPSGVCMSGMGRHVSFDQAVAWKVLGEDSNIHCLAFCFVNWSFV

SEQ ID NO: 206 - DNA, 2669 bp, Populus trichocarpa
ctgtgtttgattatttattttgtggtggaaatggccatggaagtggcccctctgcaccgagagagcagcagtagtgggagcataaacaagcaccttactgatgatgggaagtatgttcggtacacagcagagcaagtggaggctcttgaaagagtttatgcggagtgccctaagcccagctctttgcgtaggcaacaattgattagagagtgccccattttagctaatattgagccgaagcagatcaaagtctggtttcaaaatcgcaggtgtagagagaagcagagaaaagagtcctcaagactccagactgtgaacaggaaattgacagcaatgaataagctgttgatggaggagaatgatcgccttcaaaaacaggtgtcccagctggtgtgcgaaaatggtttcatgcggcaacaactgcaaactgcaccaacagcaactgatgcaagctgtgactctgtggttgccactccacaacattcactaagagatgccaataaccctgctggactcctctcaatagctgaggagaccttgtcagagttccttgcaaaggccacaggaactgctcttgagtgggtccagatgcctggaatgaagcctggtccggattcgattgggattttttccatttcacaaaggtgcggtggagtggcagcaagagcctgcggtcttgtaagtttagagcctaaaaagattgcagagatccttaaagatcgttcatcttggttccgtgattgtcggaaccttgaagttttcactatgtttcctgctggaaatggtggaacaattgaactagtgtacagtcagatatatgctccaactactcttgctccagcacgggatatgtggactctgagatacactacaagtttagagaatggcagccttgtggtctgtgagagatcactttctggttatggtgctggccccgatgcagctgccgctgcccagtttgtgagggctgaaatgcttcctagtggctatttgataaggccatgtgaaggagggtcaattatccacatcgtggatcacctgaatcttcaggcatggagtgtgcctgaggtgcttcgaccactttatgaatcatcaaaagcagtggcacagaaaatgaccattgcggcactgcgttatgtcaggcaagtagctcatgaaaccagtggtgaggtggtgtatggtttgggcaggcaaccagctgttctgagaacctttaaccaaagattaagcagaggtttcaatgatgccatcaatgggtttaatgatgatggctggtcactgatgaatgcggatggagctgaggatgtaataattgcagttaactcaaccaagaatttgattggtgctaataattctgctcattctctttcgttcttgggagggattctttgtgcgaaagcttccatgctactgcaaaatgtgcatcctgctgtgctggtctgtttcctaagggagcatcacgctgagtgggctgatttcagtgttgatgcctattctgctgcattgtggaaggctggttcatatgcatatccaggaatgaggcccatgaggtttactgggagccaaatcaccatgccactgggccacacaattgaacaagaagacttgcttgaagttattcgacttgaaggccattcttttgcacaagaagatgcttttgtttcacaggacatccatctcctacagatatgtagtggaattgatgagaatgctgttggagcctgttctgaactagtttttgctccaattgatgaaacgtttccagatgatgctccactgctaccttctggtttccgcatcatttctctggaatcaaaagcaaaggatacacaggaggtattgactacaaattgtactctggatctaacatcaagtcttgaagcggggctggcaataaaccacactgcagtggatggctcatcgtgtcatagtttgcgatcagtgttgactattgccttccagttcccttttgagagcaatctacaggataatgttgccaccatggcacgtcagtacgtacgtagtgtgatttcatctgtccagagggttgccatggccatatctccatcaggattgagtccagttttgggaccaaagctatctgcaggatctcctgaagctctaaccttggctcactggatctgccaaagtcacaggcaagttctgcttaagttttcatcatgttaccatttaggagcagaattactgagatctgattctgtgggtggagattctgtcctgaaacatctatggcatcatccagatgcaattttatgttgttcattgaagtcgctgccagttttcatctttgccaatcaggcagggcttgacatgctggagacaactctagtggctctacaagatattacactggataagatattcaatgaatctggacgccaggcattgtatacagaatttgcaaagttaatgcaacagggatttgcatgcttgcctgctggaatctgcatgtcaacaatggggcgtaatgtttcatatgagcaagctgttgcttggaaagtgctatctgcagaagagaacgctgttcattgcattgctttctcttttgtaaactggtcttttttgtgaactccacagttcatttatccaactatgcagtcgaatacgagaacaacggtatggtagagatttttgaaaatgaaaagaga

SEQ ID NO: 207 - protein, 852 aa, Populus trichocarpa
MAMEVAPLHRESSSSGSINKHLTDDGKYVRYTAEQVEALERVYAECPKPSSLRRQQLIRECPILANIEPKQIKVWFQNRRCREKQRKESSRLQTVNRKLTAMNKLLMEENDRLQKQVSQLVCENGFMRQQLQTAPTATDASCDSVVATPQHSLRDANNPAGLLSIAEETLSEFLAKATGTALEWVQMPGMKPGPDSIGIFSISQRCGGVAARACGLVSLEPKKIAEILKDRSSWFRDCRNLEVFTMFPAGNGGTIELVYSQIYAPTTLAPARDMWTLRYTTSLENGSLVVCERSLSGYGAGPDAAAAAQFVRAEMLPSGYLIRPCEGGSIIHIVDHLNLQAWSVPEVLRPLYESSKAVAQKMTIAALRYVRQVAHETSGEVVYGLGRQPAVLRTFNQRLSRGFNDAINGFNDDGWSLMNADGAEDVIIAVNSTKNLIGANNSAHSLSFLGGILCAKASMLLQNVHPAVLVCFLREHHAEWADFSVDAYSAALWKAGSYAYPGMRPMRFTGSQITMPLGHTIEQEDLLEVIRLEGHSFAQEDAFVSQDIHLLQICSGIDENAVGACSELVFAPIDETFPDDAPLLPSGFRIISLESKAKDTQEVLTTNCTLDLTSSLEAGLAINHTAVDGSSCHSLRSVLTIAFQFPFESNLQDNVATMARQYVRSVISSVQRVAMAISPSGLSPVLGPKLSAGSPEALTLAHWICQSHRQVLLKFSSCYHLGAELLRSDSVGGDSVLKHLWHHPDAILCCSLKSLPVFIFANQAGLDMLETTLVALQDITLDKIFNESGRQALYTEFAKLMQQGFACLPAGICMSTMGRNVSYEQAVAWKVLSAEENAVHCIAFSFVNWSFL

SEQ ID NO: 208 - DNA, 2634 bp, Medicago trunculata
agggtgtgattgtttaagttaatttgagattaggaagatggctatggctgttgcacaacaacaaagagataacagcattgagagacaccttgattcgtctggcaaatatgtgaggtacactgctgaacagattgaagctttggaaaaggtttatgtggaatgccctaagcctagttcattgagaaggcaacagctgattcgggagtgcccggttctggccaacattgagcctaagcagatcaaggtttggtttcagaataggaggtgtagggagaagcagagaaaagaggcttctcagcttcagagtgtgaacaggaaactttctgcgatgaataagctgttgatggaggaaaatgagaggctgcagaagcaggtttcacagctggtgaatgagaatggatttatgcgccagcaactacaccctaccccagcagctccaaatgctgacggtagtggcgttgattccgcggctgctgctcctatgaactcattgagagatgctaatagccctgctggattcctatcaattgcggaggagacattgacagagttcctttcaaaggctacaggaactgctgtcgattgggtccagatgcctgggatgaagcctggtccggattcggttgggatatttgccatttctcaaggtggcaacggagtggcagctcgagcctgtggtcttgttagtttagaacctactaagattgtggagatattaaaagatcgcccaacttggtaccgtgattgtcggagttcagaagttttcacaatgttcccagctggaaatggaggaacaattgaacttgtttacacacagacatatgctccaatgacactggcttctgctcgcgacttctggactctaagatacactacaaatttggaaaacggaagtgttgtggtttgtgaaaggtcactgtctggtactggtgctggccctaatgctgcagccgcctcacagtttgagagggctgaaatgctccctagtggctatttgattcgaccatgtgaaggtggaggatcgatcatccacattgtagaccacctaaacctgcaggcatggagtgtgccagaagtgctgcggccgatctatgaatcgtcgcaaatggtagctcagagactgacaattgcggcacttcgctatatcaggcaagtagctcaagaaacaagtggtgacgtggtgtatagcatgggtcggcaacctgcagttcttagaacttttagccaacggttgagcagaggtttcaatgacgctgtcaatggattcaatgataatggttggtctgttctgaactgtgatggtgctgagggtgttactatttcagtaaattcaatcaagaatttgagtggcacttctaatccagcaagttccctttcactccttggaggaattgtctgtgcaaaagcttctatgttactccaaaacaccactcctgctgttttagttcgctttctgagggagcatcgctcggagtgggctgattttagtgttgatgccttttctgctgcatcacttaaagctggctcctatggctatcctggaatgaggtctacaaagttcaccggcaatcaagcaatcatgcctcttggacatacaattgaacatgaagagatgctagaaattatccgccttgaaggtcttgctcaagatgattcttttgtttctagggatgttcatctcttacaggtgcttcctctgacccttgttatgttatgtactggaattgatgagaatgctgtgggggcttgttccgagctcatatttgctccaattgatgacatgttcccagaagatgctcccttagtgccttctggtttccgcattgtcctgttgaattctcaaccaggtgatacaaagaacacaacaacagcaaatcgaaccttggatttgacatctggtcttgaagtaagcccggcaacagctcatgctaacggagacgcatcgtgtcctaacaatcgatgtgtgttgactgttgcctttcagtttccttttgagagcggtctgcaggataatgttgcagccatggcacgtcaatatgtccggcgtgtagtttctgccgtgcaggcggttgcaacggctatatctccatccagtgttaacacttctggtggagcaaagctctcccctggcactccagaagcacttacactagctcaatggatctgccagagttatagtcatcatctgggcgcgcaactgctgagatctgattctcttattggtgatatgctactgaaacatttgtggcatcatccagatgctattttatgctgctctttgaagcaagtgcccgtattcatctttgctaaccaggctggccttgacatgttggaaacaactctagtggctctacaagatatcacactggacaaaatatttgatgagtctgcacgcaagaatttgattgcatattttgcgaagttaatgcagcaggggtttgcttgtatgccagctgggatctgcatgtcaacaatggggcgacatgcttcatatgatcaagccgtcgcgtggaaagtgcatgctgaagacaacagtgttcattgcttggctttctcattcattaattggtcatttatatgacctattgctggatttaaacccccacttttttttcccacttgttgaatacaaaa

SEQ ID NO: 209 - protein, 847 aa, Medicago trunculata
MAMAVAQQQRDNSIERHLDSSGKYVRYTAEQIEALEKVYVECPKPSSLRRQQLIRECPVLANIEPKQIKVWFQNRRCREKQRKEASQLQSVNRKLSAMNKLLMEENERLQKQVSQLVNENGFMRQQLHPTPAAPNADGSGVDSAAAAPMNSLRDANSPAGFLSIAEETLTEFLSKATGTAVDWVQMPGMKPGPDSVGIFAISQGGNGVAARACGLVSLEPTKIVEILKDRPTWYRDCRSSEVFTMFPAGNGGTIELVYTQTYAPMTLASARDFWTLRYTTNLENGSVVVCERSLSGTGAGPNAAAASQFERAEMLPSGYLIRPCEGGGSIIHIVDHLNLQAWSVPEVLRPIYESSQMVAQRLTIAALRYIRQVAQETSGDVVYSMGRQPAVLRTFSQRLSRGFNDAVNGFNDNGWSVLNCDGAEGVTISVNSIKNLSGTSNPASSLSLLGGIVCAKASMLLQNTTPAVLVRFLREHRSEWADFSVDAFSAASLKAGSYGYPGMRSTKFTGNQAIMPLGHTIEHEEMLEIIRLEGLAQDDSFVSRDVHLLQVLPLTLVMLCTGIDENAVGACSELIFAPIDDMFPEDAPLVPSGFRIVLLNSQPGDTKNTTTANRTLDLTSGLEVSPATAHANGDASCPNNRCVLTVAFQFPFESGLQDNVAAMARQYVRRVVSAVQAVATAISPSSVNTSGGAKLSPGTPEALTLAQWICQSYSHHLGAQLLRSDSLIGDMLLKHLWHHPDAILCCSLKQVPVFIFANQAGLDMLETTLVALQDITLDKIFDESARKNLIAYFAKLMQQGFACMPAGICMSTMGRHASYDQAVAWKVHAEDNSVHCLAFSFINWSFI

SEQ ID NO: 210 - DNA, 2211 bp, Saccharum officinarum
  misc_feature (926)..(926): n is a, c, g, or t
  misc_feature (944)..(944): n is a, c, g, or t
gattcggttggtatcgtggccatttcgcatggttgccgtggtgttgctgcccgcgcctgtggtttggtgaatctagaaccaacaagagtcatagagatcttgaaagatcgtccctcttggttccgtgattgtcgaagtcttgaagtgtttacaatgtttccagctggaaatgggggaacagttgaacttatctacatgcagatgtatgccccaacaactttagtccctgcacgtgatttttggacgttacgatacacgacaacaatggaagatggtagccttgtggtctgtgagagatccttgagtggttctggaggcggtccaaatgcagcctctgcacagcaatttgttagggctgaaatgcttccaagtgggtatttagttcgcccatgcgaaggtggaggttcgattgtgcatatagtggaccatctagatctcgaggcatggagtgttcctgaagtgcttcgaccgctgtatgagtcttccagagtagttgctcagaaaatgactacggtggcactgcgccaccttagacaaattgctcaagaaacaagtggagaagtagtgtacgccttgggaaggcaacctgcagtactacggacctttagtcaaagactaagcaggggttttaatgatgccattagtggtttcaatgatgatggctggtctgtaatggggggagatggcattgaagacgttgctgttgcttgcacctcaaccaagaaaattaggaataacagcaatgcggggattacatttggagcccctggaggcattatttgtgcgaaggcatccatgttactgcagagtgtcccaccggcagtactggtccgatttctgagggagcatagatctgaatgggctgattacaatattgatgcgtatttggcttcatcactgaagaccagtgcatgctcacttccggngttgcaacctatgagatnttctggggggcagatgatcatgccacttgctcacacagtggagaatgaggagattcttgaagttatccgccttgaaggacatcctcttactcatgatgaagctcttctttcaagagacatccaccttctccagctttgcactggaatagatgagaaatctgtgggttcctccttccagcttgtgtttgcaccaattgatgagcactttccagatgatgctccattgatttcttctggctttcgtgtcataccacttgatatgaaaacagatggtgtatcctctggcaggacgctagatttggcatctagtcttgatgtgggttctgctgcaccccaagcctcaggggatgcatctccagatgactgtaatttgagatctgtgctgacaatcgcctttcaattcccttacgagatgcaccttcaggacagtgttgcaactatggctcgtcaatatgttcgtagtgttgtttctgctgtgcaaagagtgtcgatggctatatctccctcccaatctggtctaaatgctcagaggacactttctggcttccctgaaactgccacacttgctagatgggtttgccagagttatcactaccatctaggcgtggaattacttaatcaatcagatgaagctggcgaagcattgttgaaaatgctctggcatcatccagacgctgttctgtgctgctcttttaaggagaaacctatgtttacgtttgcaaacaaggcagggcttgacatgttagaaacatctcttattgccctgcaagacctgacactagacaagattttcgacgagtcaggaaggaaagcaatattctcagatatctcaaaactaatggaacagggctacgcatacctgccgtcaggtgtgtgcatgtcaggaatgggtcgccatgtttctttcgaccaagctgtggcgtggaaggtgctcggtgaggacagcaacgtgcactgcctggctttctgcttcgtcaactggtccttcgtgtaacgcccacccatccgatggggtggcgagcctgtcggtctgtgtgatgagccagcccaattttgtatgatgatcctgataaggaaatcattgacccgggcaaaatgcttatggtgcatgcactattttgaggccctgaaatcccgggttttattaaaaaaactggagaattttcccaggttttttcccacttttcgttggcccccccacccacagggtgtttgtacaatttctttggcgaggggcaccccactcctgcagtttttttttccatac

SEQ ID NO: 211 - protein, 645 aa, Saccharum officinarum
  UNSURE (309)..(309): Xaa can be any naturally occurring amino acid
  UNSURE (315)..(315): Xaa can be any naturally occurring amino acid
DSVGIVAISHGCRGVAARACGLVNLEPTRVIEILKDRPSWFRDCRSLEVFTMFPAGNGGTVELIYMQMYAPTTLVPARDFWTLRYTTTMEDGSLVVCERSLSGSGGGPNAASAQQFVRAEMLPSGYLVRPCEGGGSIVHIVDHLDLEAWSVPEVLRPLYESSRVVAQKMTTVALRHLRQIAQETSGEVVYALGRQPAVLRTFSQRLSRGFNDAISGFNDDGWSVMGGDGIEDVAVACTSTKKIRNNSNAGITFGAPGGIICAKASMLLQSVPPAVLVRFLREHRSEWADYNIDAYLASSLKTSACSLPXLQPMRXSGGQMIMPLAHTVENEEILEVIRLEGHPLTHDEALLSRDIHLLQLCTGIDEKSVGSSFQLVFAPIDEHFPDDAPLISSGFRVIPLDMKTDGVSSGRTLDLASSLDVGSAAPQASGDASPDDCNLRSVLTIAFQFPYEMHLQDSVATMARQYVRSVVSAVQRVSMAISPSQSGLNAQRTLSGFPETATLARWVCQSYHYHLGVELLNQSDEAGEALLKMLWHHPDAVLCCSFKEKPMFTFANKAGLDMLETSLIALQDLTLDKIFDESGRKAIFSDISKLMEQGYAYLPSGVCMSGMGRHVSFDQAVAWKVLGEDSNVHCLAFCFVNWSFV

SEQ ID NO: 212 - DNA, 2076 bp, Triticum aestivum
agggtattgttgccgtttcacatggttgccgaggtgtcgctgcccgtgcctgtggtctggtgaatctacaaccaacaaagattgtggagatcttgaaagaccgcccatcttggttccgtgattgtcggagtcttgaattttttacgatgcttccagctggaaacggcgggaccattgaactcgtttacatgcagatgtatgctcctaccactttagttcctgcacgtgatttttggacgctgagatacacaactacaatggaagatggaagtctcgtggtttgtgagagatctttgagtggttcaggaggtggtccaagtactgcctcagcacagcaatttgtaagggctgagatgcttcctagtggctatttagttcggccatgcgacggtgggggttcaattgtgcatatagtggatcatctggaccttgaggcttggagtgttccagaagtgcttcgcccgctctatgagtcttctagggtagttgctcagaaaatgactactgcggcattacgacacatcagacagattgctcaagaaactagtggggaggttgtatatgctctagggaggcaacctgctgttctgcggacatttagtcagaggctgagtagaggatttaatgatgctataagtggcttcaatgatgatggttggtctgtaatggctggagacggcattgaagatgtgattattgcttgcaactcaaaaaagattagaagcaataacactgctcccaatgcgtttatagctcctggaggtgttatatgtgctaaagcatcaatgttactgcagagtgttccaccagcagtactggttcggtttctgagggaacatcggtctgaatgggctgattataactttgatgcatattcggcttcagcgctgaaatcaagctcatgctcacttcctgggttgcgtcccatgagattttctgggagccagatcatcatgccacttgctcacacagtggagaatgaggagattctagaagttgttcgtcttgaagggcaagcgctcgatgagggtcttttatcaagagatatccacctgcttcagttttgcactggactagacgagaaatcaatgggatcctgcttccaacttgtctttgcaccaattgatgagcttttccctgatgatgctccattaatatcttcaggctttcgtgttataccactggacatgaaaacagatggtgcacccgccggtagaacactagatttggcctctagccttgaagctggttcaactacactgcaagcctcaggcggtgcggatgattgtaatctacgatcagtgctgacaattgcctttcaattcccttacgagatgcatctccaagatagtgttgcaactatggcccggcagtatgtccgcagcattgtctccgccgttcagagagtgtcgatggctatctctccctctcgatctggcttgaatgctgaacagaagataatttctggcttccctgaagctgcaacactagctcgctggatatgccaaagttaccggttccatctgggggtcgagttatttagacaggcagatgaagctggggaatctttattgagaatgctctgggatcatgaagatgctattttgtgctgttctttcaaggaaaagcctgtatttacgtttgcaaacgagatgggaattaacatgttggaaacatctttcgttgcccttcaagatctctcgttggacaagatatttgatgaagctggtagaaaggcactatactccgagatcccaaagttgatggagcagggctttgtttacctgccagggggtgtgtgcttgtctgggatgggccgccatgtctcatttgagagtgctgtagcatggaaagtagttggtgaggacaacaatgtgcactgcctcgccttctgcttcgtcaactggtctttcgtgtgatcatccatcacccttgcctgtcccatgcagctccatttttgctctctctgtaggggagaaccgccgccactggaaagtagttttacgttatctttaactagtttgtttctagatttgaagagccagcatcgggaagaattctgcctagtgaaaattg

SEQ ID NO: 213 - protein, 638 aa, Triticum aestivum
GIVAVSHGCRGVAARACGLVNLQPTKIVEILKDRPSWFRDCRSLEFFTMLPAGNGGTIELVYMQMYAPTTLVPARDFWTLRYTTTMEDGSLVVCERSLSGSGGGPSTASAQQFVRAEMLPSGYLVRPCDGGGSIVHIVDHLDLEAWSVPEVLRPLYESSRVVAQKMTTAALRHIRQIAQETSGEVVYALGRQPAVLRTFSQRLSRGFNDAISGFNDDGWSVMAGDGIEDVIIACNSKKIRSNNTAPNAFIAPGGVICAKASMLLQSVPPAVLVRFLREHRSEWADYNFDAYSASALKSSSCSLPGLRPMRFSGSQIIMPLAHTVENEEILEVVRLEGQALDEGLLSRDIHLLQFCTGLDEKSMGSCFQLVFAPIDELFPDDAPLISSGFRVIPLDMKTDGAPAGRTLDLASSLEAGSTTLQASGGADDCNLRSVLTIAFQFPYEMHLQDSVATMARQYVRSIVSAVQRVSMAISPSRSGLNAEQKIISGFPEAATLARWICQSYRFHLGVELFRQADEAGESLLRMLWDHEDAILCCSFKEKPVFTFANEMGINMLETSFVALQDLSLDKIFDEAGRKALYSEIPKLMEQGFVYLPGGVCLSGMGRHVSFESAVAWKVVGEDNNVHCLAFCFVNWSFV

SEQ ID NO: 214 - DNA, 1554 bp, Hordeum vulgare
gcgctggggaggcagcctgctgttctgcggacatttagtcagaggctgagtagaggatttaatgatgctataagtggcttcaatgatgatggttggtctgtaatggccggagatggcattgaagatgtgattatcgcttgcaactcaaagaagattaggagcaataacactgctcccaatgcttttatagctcctggaggtgttatatgtgctaaagcatcaatgttactgcagagtgttccaccagcagtactggttcgatttctaagggaacatcggtctgaatgggctgattataactttgatgcatattcggcttcagcgctgaaatcaagttcatgctcacttcctgggttgcgccctatgagattttctgggagccagatcatcatgccacttgctcacacggtggagaatgaggagattctagaagttgttcgtcttgaagggcaagcgctcgatgagggtcttttatcaagagatatccacctgcttcagttttgcactggaatagacgagaaatcaatggggtcctgcttccaacttgtctttgccccaattgatgagcttttccctgatgatgctccattaatatcttcaggcttccgtgttataccactggacatgaaaacagatggtgcacccaccggtagaacactagatttggcctctagccttgaagctggttcaactacactgcaagcctcaggcaatgcggacgattgtaatctacgatcagtgctgacaattgcctttcaattcccttacgagatgcatctccaagatagtgttgcaaccatggcccggcagtatgtccgcagcattgtctctgccgttcagagagtgtcgatggctatctctccctctcgatctggtttgaatgctgaacagaagataatttctggcttccctgaagctgcaacacttgctcgctggatatgccaaagctaccggttccatctgggggtcgagttatttagacaggcagatgaagctggggaatctttattgagaatgctctgggatcatgaagatgctattttgtgctgttctttcaaggaaaagcctgtatttacgtttgcaaacgagatggggattaacatgttggaaacatctttcgttgcccttcaagacctctcgttggacaagatatttgatgaagctggtagaaaggcactatactctgagatcccaaagttgatggagcagggctttgtttacctgccaggtggtgtgtgcttgtctgggatgggccgccatgtctccttcgagaatgctatagcatggaaagtagtcggtgaggacaacaatgtgcactgccttgccttctgcttcgtcaactggtctttcgtgtgatcatcctcccaaggcaatccgtgcccgtcgcacgcagctccatttttgctctctctctctgtaggagagaaccgctgccgctggaaagtagtttcatgctatctttaactagtttgtttgtagatttgaagagccagcatccggaagaattctgccttgtgtaaatctgctcacatttccactaatttacccaggcaa

SEQ ID NO: 215 - protein, 451 aa, Hordeum vulgare
ALGRQPAVLRTFSQRLSRGFNDAISGFNDDGWSVMAGDGIEDVIIACNSKKIRSNNTAPNAFIAPGGVICAKASMLLQSVPPAVLVRFLREHRSEWADYNFDAYSASALKSSSCSLPGLRPMRFSGSQIIMPLAHTVENEEILEVVRLEGQALDEGLLSRDIHLLQFCTGIDEKSMGSCFQLVFAPIDELFPDDAPLISSGFRVIPLDMKTDGAPTGRTLDLASSLEAGSTTLQASGNADDCNLRSVLTIAFQFPYEMHLQDSVATMARQYVRSIVSAVQRVSMAISPSRSGLNAEQKIISGFPEAATLARWICQSYRFHLGVELFRQADEAGESLLRMLWDHEDAILCCSFKEKPVFTFANEMGINMLETSFVALQDLSLDKIFDEAGRKALYSEIPKLMEQGFVYLPGGVCLSGMGRHVSFENAIAWKVVGEDNNVHCLAFCFVNWSFV

SEQ ID NO: 216 - DNA, 2622 bp, Phyllostachys praecox
cggcgggtacgacaaggccgggatagactcgggcaagtacgtgcgatacacgccggagcaggtggaggcgctcgagcggatgtatgctgagtgccccaagcccagctccacgcgcaggcagcagctgctgcgcgagtgcccgattctggccaacatcgagcccaagcagatcaaggtctggttccagaaccgaaggtgccgtgataagcagcggaaggaggcttcccggcttcaggccgtgaacagaaaattgaccgcaatgaacaagcttctcatggaagagaatgatcgtctccagaagcaggtttcccagctggttcatgagaatgcatacatgaagcagcagctgcagaatccatcattggccaatgatacaagctgtgaatcaaatgtgaccactcaaaaccctctgaaggatgcaagtaacccttctggactcctttcaattgcggaggagaccttgacagagttcctctccaaggctacagggactgctgttgattgggttcagatgcctgggatgaagcctggtccggattcggttggtattgtggccatttcacatggttgccgtggtgttgctgcccgtgcctgtgatttggtgaatctagaaccaacaaaagttgtggagatcttgaaagaccgtccatcttggttctgtgatcgtcaaagcctggaagtcttcacaatgtttccagctggaaatggaggaacaattgaacttgtctacacgcagttgtatgctccaacaactttagtccctgcacgtgatttttggactctaaggtacacaaccacaatggaagatggcagccttgtggtctgtgagagatccttgagtggttcagggggtggtccaagtgcagcctctgcacagcaatttgtaagagccgaaatgcttccaagtggatatttagttcgcccatgcgagggtgggggctcaattgtgcacatagtggaccatctggaccttgaggcttggagtgttcctgaagtgcttcggccgctctacgagtcgtctagggtagttgcccagaaaatgactacagcggcactacggcacatcagacaaattgctcaagaaactagtggggaggttgtatatgctttggggaggcagcctgccgttctacggacatttagtcagaggttgagtagaggatttaacgatgctataagtggtttcaatgatgatggttggtctgtcatgggtggagatggcattgaagatgtaatcattgcttgcaactcaaagaagattaggaacaatagcactgctgccaatgcttttggagcccctggaggcgttatatgtgctaaggcatccatgttactgcagagtgttccaccagcagtactggttcggtttctgagggaacatcggtctgaatgggctgattataactttgatgcatattcggctttagcactgaagacgagctcatgttcacttcctgggttgcggcctacgagattttctgggagccagatcatcatgccacttgctcacacagtggagaatgaggagattctagaagtcattcgtcttgaagggcaggcacttacacatgatgaaggtcttttatcaagagatatccacctgcttcagctttgcactggaatagatgagaaatcaatgggatcctgcttccagcttgtctttgcacccatcgatgagcttttccctgatgatgccccattgatatcttcaggctttcgtgttataccactggacatgaaaacagatggtgcacctactggtagaacattagatttggcctctagccttgaagttggttcaactacacaacaagctacaggggatgcatctttggatgattgtaggaatctgcgatcagtgctgacaattgcctttcaattcccttatgaaattcatctccaggatagtgttgcaactatggcccggcaatacgtccgtagcgttgtttctgctgtgcagagagtgtcgatggctatttctccccctcgatctggtgtgaatgctgggcagaagatattttctggcttccctgaagccgcaacacttgctcgctggatttgccaaagctaccagttccatttgggagtggagttacttaggcaggcagatgaagccggggaatcattattgagaatgctctgggattacgaagatgctatcttgtgctgttctttcaaggaaaagcctgtatttacttttgccaacgagatgggacttaacatgttagaaacatctctcgttgctctacaagacctctcattggacaagatatttgatgaaactggtagaaaggcactacattcggagatcccaaaattgatggaacagggctatgtttacctgccggctggtgtgtgcttgtccggaatgggccgccatgtctctttcgagcaagctgtagcatggaaagtacttggtgaggacaacaatgtgcactgcctggccttctgcttcgtcaactggtctttcgtgtgatccatccgacgcaatccatgtccgttgtgagcagcaccattttcgcattctctgtagaagagaaccatcgtcgctgttagttaatgctgtctttaactagtttctagatttggaaaagccagtctgcaaaaaaaaaaaaaaaaaaa

SEQ ID NO: 217 - protein, 824 aa, Phyllostachys praecox
GGYDKAGIDSGKYVRYTPEQVEALERMYAECPKPSSTRRQQLLRECPILANIEPKQIKVWFQNRRCRDKQRKEASRLQAVNRKLTAMNKLLMEENDRLQKQVSQLVHENAYMKQQLQNPSLANDTSCESNVTTQNPLKDASNPSGLLSIAEETLTEFLSKATGTAVDWVQMPGMKPGPDSVGIVAISHGCRGVAARACDLVNLEPTKVVEILKDRPSWFCDRQSLEVFTMFPAGNGGTIELVYTQLYAPTTLVPARDFWTLRYTTTMEDGSLVVCERSLSGSGGGPSAASAQQFVRAEMLPSGYLVRPCEGGGSIVHIVDHLDLEAWSVPEVLRPLYESSRVVAQKMTTAALRHIRQIAQETSGEVVYALGRQPAVLRTFSQRLSRGFNDAISGFNDDGWSVMGGDGIEDVIIACNSKKIRNNSTAANAFGAPGGVICAKASMLLQSVPPAVLVRFLREHRSEWADYNFDAYSALALKTSSCSLPGLRPTRFSGSQIIMPLAHTVENEEILEVIRLEGQALTHDEGLLSRDIHLLQLCTGIDEKSMGSCFQLVFAPIDELFPDDAPLISSGFRVIPLDMKTDGAPTGRTLDLASSLEVGSTTQQATGDASLDDCRNLRSVLTIAFQFPYEIHLQDSVATMARQYVRSVVSAVQRVSMAISPPRSGVNAGQKIFSGFPEAATLARWICQSYQFHLGVELLRQADEAGESLLRMLWDYEDAILCCSFKEKPVFTFANEMGLNMLETSLVALQDLSLDKIFDETGRKALHSEIPKLMEQGYVYLPAGVCLSGMGRHVSFEQAVAWKVLGEDNNVHCLAFCFVNWSFV

SEQ ID NO: 218 - DNA, 2193 bp, Oryza sativa; identical to SEQ ID NO: 5

SEQ ID NO: 219 - DNA, 51 bp, Artificial sequence
  primer: prm03263
ggggacaagtttgtacaaaaaagcaggcttgtgctaaggcatccatgctac

SEQ ID NO: 220 - DNA, 51 bp, Artificial sequence
  primer: prm03264
ggggaccactttgtacaagaaagctgggtgcaccttccatgctacagcttg

SEQ ID NO: 221 - DNA, 50 bp, Artificial sequence
  primer: prm01983
ggggacaagtttgtacaaaaaagcaggcttcacaatggcggcggcggtgg

SEQ ID NO: 222 - DNA, 54 bp, Artificial sequence
  primer: prm01984
ggggaccactttgtacaagaaagctgggtggattttgggtcacacgaaggacca

SEQ ID NO: 223 - DNA, 1096 bp, Oryza sativa
tgtgctaaggcatccatgctactgcagagtgtccctcctgcagttttggttcgatttttgagggaacatcgttctgaatgggcggattataacttcgatgcatattcagcttcatctctgaagacaagctcatgttcacttcctgggttgcggcctatgagattttctgggagccagatcattatgccacttgctcacacggtggagaatgaagagattttagaagttgtccgtcttgaaggacaagcacttacacatgatgatggtcttatgtctagagatattcacctgcttcagctttgcactggaatagatgagaaatcaatgggatcctgcttccagcttgtctttgcaccaatcgatgagcttttccctgatgatgctccgttaatatcttcaggctttcgtgttataccgctggacatgaaaacagatggtacacctgctggtagaacattagatttggcatctagccttgaggttggttcaactgcacagcccacaggggatgcatctatggatgactgtaatctacgatcagtgctgacaattgcctttcagttcccttatgaaatgcatctccaagacagcgttgcaactatggcccggcaatatgtccgcagtattgtttcctctgttcagagagtatcaatggctgtttctccttctcggtctggcttgaatgctgggcagaagataatttcaggcttccctgaagccccaacgctagctcgttggatttgccaaagctaccagttccatttgggggtggagttacttaggcaggcagatgatgctggggaagcactattgaaaatgctatgggattacgaagacgctattttgtgctgttctttcaaggaaaagcctgtatttacttttgccaacgagatgggactaaacatgctagaaacatctctcgtcgctctccaagatctctcactggacaagatatttgatgaagccggtaggaaggccctatacaacgagatcccgaaattgatggaacagggttacgtgtacctgcctggtggagtgtgcttgtccgggatggggcgccatgtttctttcgagcaagctgtagcatggaaggtgc

SEQ ID NO: 224 - DNA, 2553 bp, Brassica rapa
atggagatggcggtggcgaatcaccgagagagaagcagtgatagcatgaacagacatttagacagcagcggcaagtacgtcaggtacaccgctgagcaagtcgaggccctcgagcgtgtctacgccgagtgtcccaagcctagctcgctccggagacagcagttgatccgtgaatgttctatcttggccaacatcgagcctaagcagatcaaagtctggttccaaaaccggaggtgtcgagataagcagaggaaagaggcgtcgaggctccagagcgtaaacaggaagctttcggctatgaacaagctgttgatggaggagaacgataggttgcagaagcaagtttctcagctcgtctgtgaaaatggatacatgaagcagcagcttactactactgttgtgaatgatccaagctgtgattctgtggtgacaactcctcagcattcgcttagagacgctaatagtcctgctgggctgctctcgatcgcagaggagacattggcagagttcctatccaaggctacaggaactgctgttgattgggttcagatgcctgggatgaagcctggtccggattcggttgggatctttgctatatcgcaaagatgcagtggggtggcagctcgagcctgtggtcttgttagtttagagcctgtcaagattgcagagatactcaaagataggccatcttggttccgtgactgtaggagccttgaagtcttcactatgttcccggctggtaacggcggcaccattgagctcgtctatatgcagacatatgcaccaacgactctggctcctgcccgcgatttctggaccctgagatacacaacgagcctagacaatggcagttttgtggtttgtgagaggtcactctctggttctggtgctggtcctaacgctgcatcagcttctcagtttgtaagagcagaaatgctttctagtgggtatctaataaggccttgtgatggtggcggttccattattcacattgtcgatcaccttaatcttgaggcttggagtgttcccgatgtgcttcgacccctttacgagtcatctaaagtcgtagcacagaaaatgaccatttcagcattgaggtatatcaggcaactagctcaagagtctaatggtgaattagtgtatggattaggaagacagcctgctgttttaagaacatttagccaaagattaagcaggggttttaatgatgcggttaatgggtttggtgacgacggatggtctacaatgcattgtgatggggctgaagacataatcgttgctattaactctacaaagcatttgaataatatgtctaattctctttccttccttggaggtgtcctttgtgccaaggcttctatgcttctccaaaatgttcctcctgcggttttgatccggtttctaagagagcatcggtccgagtgggctgacttcaatgttgatgcatattctgctgcaacgcttaaagccggttcttttgcttatccgggtatgaggcctacaaggttcaccgggagccaaatcataatgcctctaggacataccatcgaacacgaagaaatgcttgaagttgttagactagaaggtcattctcttgcacaagaagatgcgttcatgtcccgtgatgtccatcttcttcaggtatgtactgggattgatgagaacgctgttggagcatgttcagaactaatatttgctcccatcaatgagatgttcccggatgatgctccacttgttccttctggattcagagtcatacccgttgatgctaaaacgggagatgcgcaagatctgttgaccgctaaccaccggacgctagacttgacttctagccttgaggttggtccaacaccagagaacgcttctggaaactcttcttctagctcaagctcaagatgtatcctcaccatcgcgtttcagttcccttttgaaaacaacttgcaagacaatgttgctggtatggcttgtcagtacgtgcggagcgtgatctcatcggttcaacgtgttgcaatggccatctcaccctctgggataagcccaagtctgggatccaaactgtccccggggtctcctgaagctgttacacttgcccaatggatctcacaaagttacagtcaccacttaggctcggagttgctgacggttgactcgcttggaagcaacgactcggtattgaaacttctatgggatcaccaagatgccattttgtgttgctctttaaagcctcagccagtgtttatgttcgcgaaccaagctggtttagacatgttagagacgacgcttgtagccttacaagacattacactcgaaaagatctttgatgaatctggtcgaaaggctctctgctccgatttcgccaagctaatgcaacagggatatgcatgcttgccttcaggaatatgtttgtctacgatgggaagacatgtgacttatgaacaagctgttgcttggaaagtgtttgctcctgctgctgcatcatccgaaaacaacgatggcaatgataatactttgcactgtcttgctttctcctttgtaaactggtcgtttgtgtaa

SEQ ID NO: 225 - protein, 850 aa, Brassica rapa
MEMAVANHRERSSDSMNRHLDSSGKYVRYTAEQVEALERVYAECPKPSSLRRQQLIRECSILANIEPKQIKVWFQNRRCRDKQRKEASRLQSVNRKLSAMNKLLMEENDRLQKQVSQLVCENGYMKQQLTTTVVNDPSCDSVVTTPQHSLRDANSPAGLLSIAEETLAEFLSKATGTAVDWVQMPGMKPGPDSVGIFAISQRCSGVAARACGLVSLEPVKIAEILKDRPSWFRDCRSLEVFTMFPAGNGGTIELVYMQTYAPTTLAPARDFWTLRYTTSLDNGSFVVCERSLSGSGAGPNAASASQFVRAEMLSSGYLIRPCDGGGSIIHIVDHLNLEAWSVPDVLRPLYESSKVVAQKMTISALRYIRQLAQESNGELVYGLGRQPAVLRTFSQRLSRGFNDAVNGFGDDGWSTMHCDGAEDIIVAINSTKHLNNMSNSLSFLGGVLCAKASMLLQNVPPAVLIRFLREHRSEWADFNVDAYSAATLKAGSFAYPGMRPTRFTGSQIIMPLGHTIEHEEMLEVVRLEGHSLAQEDAFMSRDVHLLQVCTGIDENAVGACSELIFAPINEMFPDDAPLVPSGFRVIPVDAKTGDAQDLLTANHRTLDLTSSLEVGPTPENASGNSSSSSSSRCILTIAFQFPFENNLQDNVAGMACQYVRSVISSVQRVAMAISPSGISPSLGSKLSPGSPEAVTLAQWISQSYSHHLGSELLTVDSLGSNDSVLKLLWDHQDAILCCSLKPQPVFMFANQAGLDMLETTLVALQDITLEKIFDESGRKALCSDFAKLMQQGYACLPSGICLSTMGRHVTYEQAVAWKVFAPAAASSENNDGNDNTLHCLAFSFVNWSFV

SEQ ID NO: 226 - DNA, 2529 bp, Ginkgo biloba
atggcagtaatagcacagaaagacgttaaaggtgccatggatacgagcaagtatgttcgctatacttctgaacaagtcgaagctcttgaacgcgtttacagcgagtgtccgaagcctagttctcttcgtcggcagcagcttattagagagtgtccaatactttctaatattgagcccaagcaaatcaaagtttggttccaaaatcgcaggtgtcgagagaaacagaggaaggaggcatcacgccttcaaactgttaacaggaagcttacggcaatgaacaaattgctgatggaggaaaatgatcgccttcaaaagcaggtttcacagttggtgtacgagaacggttatatgagacagcagctacagaatgcatctgtagcaacaacagacacaagttgtgagtctgttgtgactagtggtcagcaccagcataatccaacacctcagcatcctccaagggatgctagccccgctggactcctgtctatcgcagaggagaccttggcagagttcctttcaaaggctacaggaactgctgttgactgggtccagatgcctgggatgaagcctggtccggattcgattggtattgtggctatttcacacagttgtagtggagtagctgcacgagcttgcggtcttgtgggtttagaacctacaaagattgcagaaattctcaaagatcgcccatcttggcttcgtgattgccgttgccttgatgtgttgactccctttcctactggaaatggagggacaattgagcttttatacatgcagacatatgctcccacaactttagcttctgctagagatttttggactctgagatacaccacagtattggaagatggtagtcttgtggtttgtgaaaggtccttaagtggtgcccagggtggtccaagcatagctcctgcacagcactttgtaagagcagaaatgcttcccagtgggtatttgataagaccttgtgaaggtggaggttctattatccatattgttgaccatatggatttggagccatggagtgtgcctgaggtgttacgtccactatatgagtcatctactgtactcgcccaaaagatgactattgcagccttgcgccgcatacgccaaatagcacaggaggttacaggtgaagtggtctttggttggggtaggcagccagctgttctgcggacatttagccagagactgagcaggggtttcaatgaggctgtgaatggcttcacagatgatggatggtctttgatgggtaatgatggaatggaggacgtgactattgcaataaattcatctccaagcaaactcctaggttctcaggttaattcttctaatgggcttacagctgttggtgggggtatactgtgtgcaaaggcatccatgcttttacagaatgtgcctccagcattacttgttcgcttcttgcgggagcatcgatcggagtgggcagattgtaacattgacgcctattctgcagctgcattaaaggcaagtccttatagtgtcccaggttcacgagcaggaggcttttcaggaagtcaagttatcctccccctggcacataccgtggaacatgaagagttcttggaggtcattaagctggagggccatggcctcacacaggaagaagctgtgctatctagggatatgtttctgttgcagctttgcagtggaattgatgaaaatgcagctggtgcttgtgcccaacttgtgtttgcaccaattgatgaatcatttgctgatgatgctcctttgttgccgtctggtttccgagttattcctctggactctagaacagatggtactagtggtcccaatcggacattggatctggcttcagctcttgaggttggatcagctggaactagaacttctggcgattctggagccaactcgttcaatctaagatctgtgttaactattgcattccaattcacttatgagaatcatttgcgagaaaatgtggcatccatggcccgtcaatatgtacgcagtgttgtagcatctgtgcagagggttgccatggcattagccccctctcgactgagttcacatgtggggccaaggctaccacctggcactccagaagcacttactcttgctcggtggatttgtcaaagctacagattccacctaggtgtagagctgcttcgcgctgattgtgaggccagtgaatccgtgctgaaactactctggcaccattcagatgcaattgtgtgctgttctttgaagtcgctaccagttttcacatttgcaaatcaagcaggccttgacatgctggagacaaccctggttgccttgcaagatatatcattggacaaaatactcgatgaaaatggacgcaaaagtttatgctcagattttgcacaaattatgcaacagggctatgcttatctgcctgcggggatatgtgtctctagtatgggcaggcctgtttcatatgaccgggctgttgcttggaaggtcctaaatgatgcagacagcacccactgcatggttttcatgtttatgaattggtctttcatgtga

SEQ ID NO: 227 - protein, 842 aa, Ginkgo biloba
MAVIAQKDVKGAMDTSKYVRYTSEQVEALERVYSECPKPSSLRRQQLIRECPILSNIEPKQIKVWFQNRRCREKQRKEASRLQTVNRKLTAMNKLLMEENDRLQKQVSQLVYENGYMRQQLQNASVATTDTSCESVVTSGQHQHNPTPQHPPRDASPAGLLSIAEETLAEFLSKATGTAVDWVQMPGMKPGPDSIGIVAISHSCSGVAARACGLVGLEPTKIAEILKDRPSWLRDCRCLDVLTPFPTGNGGTIELLYMQTYAPTTLASARDFWTLRYTTVLEDGSLVVCERSLSGAQGGPSIAPAQHFVRAEMLPSGYLIRPCEGGGSIIHIVDHMDLEPWSVPEVLRPLYESSTVLAQKMTIAALRRIRQIAQEVTGEVVFGWGRQPAVLRTFSQRLSRGFNEAVNGFTDDGWSLMGNDGMEDVTIAINSSPSKLLGSQVNSSNGLTAVGGGILCAKASMLLQNVPPALLVRFLREHRSEWADCNIDAYSAAALKASPYSVPGSRAGGFSGSQVILPLAHTVEHEEFLEVIKLEGHGLTQEEAVLSRDMFLLQLCSGIDENAAGACAQLVFAPIDESFADDAPLLPSGFRVIPLDSRTDGTSGPNRTLDLASALEVGSAGTRTSGDSGANSFNLRSVLTIAFQFTYENHLRENVASMARQYVRSVVASVQRVAMALAPSRLSSHVGPRLPPGTPEALTLARWICQSYRFHLGVELLRADCEASESVLKLLWHHSDAIVCCSLKSLPVFTFANQAGLDMLETTLVALQDISLDKILDENGRKSLCSDFAQIMQQGYAYLPAGICVSSMGRPVSYDRAVAWKVLNDADSTHCMVFMFMNWSFM

SEQ ID NO: 228 - DNA, 2511 bp, Gossypium barbadense
atggctatggcgatgacacatcatcacaacagggaaagcagcatagacaagcatttagatacaggcaagtatgttaggtacacagctgaacaagttgaagctttggaacgtgtttatgctgaatgtccaaaaccaagttctttgcgtaggcaacagttaataagggaatgtcctattctttctaacattgagcctaaacagttcaaagctttgttccaaaatcgcaggtgtagagagaaacaaaggaaagaagcttcaaggcttcaaacagtaaatagaaaattaacagcaatgaataagctgttaatggaagagaatgataggttgcaaaaacaggtttctcagttggtttgtgagaatgggtacatgagacagcaattgcatactgtaaatgcatcggcgactgatgcgagctgtgactctgcggtaaccactcctcagcattcactgagaaatgctaataaccctgctggactcctctctatcgcggaggagaccttggcagagttcctttctaaggctacgggaactgctgtcaattgggtccagatgcctgggatgaagcctggtccagattcagttgggatatttgccacttcccaaagttgtagtggaatggcagctcgagcttgtggtcttgtaagtttagaacctacaaagattgcagagattcttaaagatcgtccatcttggttccgggactgtcggaagcttgaagttttcaccatgtttccagctggcaatggtggtacgattgagcttgtatacacacagatgtttgctcctactacattggctcctgcaagggacttttggactctaaggtacactacaactttagagaacggcagtctcgtggtgtgtgagaggtctctttcgggttccggtgctggcccgagtgtggcttccgcagctcaatttgtgagagctgaagtgctccctagtggctatttgattaggccttgtgagggtggagggtcgattatccatattgttgaccacttgaatcttgaggcatggagtgtgccggaggtcttgcgccccctttatgaatcatccagagtaattgctcagaaaatgactattccggcgctgcgctatgttaggcagattgctcaagagacaagcggcgaggtggtttacagtttgggcaggcagcctgctgtgcttagaacatttagccaaagattaagcaggggcttcaatgaggcaataaatggattcaacgaagatggctggtcgataatgaattgtgatggtacagaggatgtgataattgctattaattccggcaagagcttgagcaacagttcgaatttgaccaccggtctttcattcctcgggggcgttctatgtgcaaaggcatccatgctgcttcaaaatgttcctcctgctgttcttgtccgattcttgagggaacatcgtttggaatgggctgatttcaatgtcgatgcttattcagctgcatcattgaaggccggaacatacacttatcctggaatgagacctacaagttttactgggagtcagatcatcatgccactcggccagacggtcgaacatgaagagctgctcgaagttataagactcgaaggccagtctcttacgcaagaagacgcgcttctatcaagggacattcatctattacagatatgtagtggaattgatgacaatgcggttggggcctgttcggagcttgtgtttgcaccaatagatgagatgtttccggatgatgctgccttactaccttcaggattccgcattatcccgttggagtcaaaaccagattcgttggctacaaatcggactttggatcttacttcgagtctcgaagtggggcctgcaacaagccaagctgccggagattctccgagtcagaatgcacgatcggtgttgacaattgccttccagtttcccttcgatacaaatcttcgggataatgttgcgaccatggcacgccagtatgtccgtagcgtcatttcttctgtccagaggrttgctatggccatatctccatgyggatcgagcccaactataggaccaaagccatctccaggttctcccgaagcgcttacgttggctcattggatctgccagagctacagtttccatttgggggaagagttgttgaaatccgaatcacttggtggcgactcagtattgaagaatctttggcaacatcaggatgcaatattgtgttgttcgttgaagtctgtaccggttttcatcttcgcaaatcaggccggtctagacatgcttgagacaactctagtggatctaccagacatcacactggacaaaatattcgatgagtcgggacggaaggcattgtgctctgatttcaccaagttgatgcagcagggattcactcacttgctggccggagtttgcatgtcgacaatgggccgccacgtctcgtatgaacaagctgttgcttggaaagtacttgcagctgatgcaaacactgtccactgcttggcattctcttttataaactggtcttttgtgtga

SEQ ID NO: 229 - protein, 836 aa, Gossypium barbadense
  UNSURE (666)..(666): Xaa can be any naturally occurring amino acid
MAMAMTHHHNRESSIDKHLDTGKYVRYTAEQVEALERVYAECPKPSSLRRQQLIRECPILSNIEPKQFKALFQNRRCREKQRKEASRLQTVNRKLTAMNKLLMEENDRLQKQVSQLVCENGYMRQQLHTVNASATDASCDSAVTTPQHSLRNANNPAGLLSIAEETLAEFLSKATGTAVNWVQMPGMKPGPDSVGIFATSQSCSGMAARACGLVSLEPTKIAEILKDRPSWFRDCRKLEVFTMFPAGNGGTIELVYTQMFAPTTLAPARDFWTLRYTTTLENGSLVVCERSLSGSGAGPSVASAAQFVRAEVLPSGYLIRPCEGGGSIIHIVDHLNLEAWSVPEVLRPLYESSRVIAQKMTIPALRYVRQIAQETSGEVVYSLGRQPAVLRTFSQRLSRGFNEAINGFNEDGWSIMNCDGTEDVIIAINSGKSLSNSSNLTTGLSFLGGVLCAKASMLLQNVPPAVLVRFLREHRLEWADFNVDAYSAASLKAGTYTYPGMRPTSFTGSQIIMPLGQTVEHEELLEVIRLEGQSLTQEDALLSRDIHLLQICSGIDDNAVGACSELVFAPIDEMFPDDAALLPSGFRIIPLESKPDSLATNRTLDLTSSLEVGPATSQAAGDSPSQNARSVLTIAFQFPFDTNLRDNVATMARQYVRSVISSVQRXAMAISPCGSSPTIGPKPSPGSPEALTLAHWICQSYSFHLGEELLKSESLGGDSVLKNLWQHQDAILCCSLKSVPVFIFANQAGLDMLETTLVDLPDITLDKIFDESGRKALCSDFTKLMQQGFTHLLAGVCMSTMGRHVSYEQAVAWKVLAADANTVHCLAFSFINWSFV

SEQ ID NO: 230 - DNA, 2526 bp, Lycopersicon esculentum
atggctatggtggctcaacagcatagggagagtagtagtggtagtattactaaacatcttgatagtagtggaaagtatgttcgatatacggctgagcaagttgaggctttggagagggtttatgcagagtgtcctaagcctagctcgttgcgtcgacagcaattgatccgtgaatgtcatattctgtcgaatatcgagcctaagcagatcaaagtttggtttcagaacagaaggtgtcgagagaagcaaaggaaagagtcttctcgattgcagactgtgaacagaaagttgtctgcgatgaataaactgttgatggaggagaatgaccgcttgcagaaacaagtctcgcagcttgtatgtgaaaatggctatatgcggcaacaattgcaaagtgtatcggcggccactactgatgtaagttgtgaatcagtggtaaccactcctcagcattcccttagagatgctaacaaccctgctggactactaccaattgcagaagaaaccttggcagagttcctttctaaggctacaggaactgctgtcgattgggtcccgatgcctgggatgaagcctggtccggattcagttgggatttttgccatctcacacagttgcagtggagtggcagcccgagcatgtggtcttgttagtttagagccaacaaagattgctgatatcctcaaagatcgaccttcttggttccgcgactgccggaatgttgaagttatcacaatgtttcctgctggaaatggtggtacagttgagcttttgtatacccagatatatgctcccacaactctggctcccgcgcgtgatttttggacgctgagatacacaacaaccctagacaatggtagtctcgtggtttgtgaaagatccctatctggtaatgggcctggcccaaatcctactgctgcttcccagtttgtaagagctcaaatgcttccatctggatatctgatccgaccgtgtgatggtggaggatcaatcatacatattgttgatcacctgaatcttgaggcatggagtgcccctgagattttgcgtccactctatgaatcgtcgaaagttgtggcacagaaaatgactattgcagcactgcgatatgcaaggcaactagctcaagagactagcgacgaggtagtatatggtctaggaaggcaacctgctgttcttcgaacatttagccagagattatgcagagggttcaatgatgccatcaatggattcggtgacgatggctggtcaatgttaagttcagatggtgctgaagatgtcatagttgctgtcaattcaaggaagaacctcgcaaccacctccattcctctttccccgcttggtggcgtcctttgtgccaaagcatcaatgctactccagaatgtcccccctgccgtactggttcggtttctgagggagcaccgttcagagtgggcagactttaatgttgatgcttttgtagcttctgcattgaagtcttgtccgtatacatatcctgggatgaggcctaccagatttaccggtagccagataataatgccacttggccacacaattgagcatgaagaaatgcttgaagttattagacttgaagggcactctattggacaggaagatgcttttatgccaagagatattcaccttttacagatgtgtagtggcactgatgagaatgcagttggagcctgttctgaactagtttttgcccctattgatgagatgtttccagatgatgcacctttgcttccctccggatttcgcgttattcctctcgaatcaaaatcaggtgatgcccaggatacgttgaacgcacatagaacattagatctagcatcaagtcttgaagtgggcccagcaacaaactcgactactggagatgcagcttcttgttacagtgcacgatctgtactgacaatcgctttccaatttccatttgaggacaatcttcaggacaatgtggctaccatggcccgacagtatgttcgcagtgtggtttcgtctgtccaacgagttgccatggcaatatctcctacgggaatgaatcctacactgggggccaagctttctccaggctcaccagaagctgtaacattgtcgcattggatctgccagagctatagttatcacatgggaacagagttacttcgagctgattctagtggcgatgaatcagtactaaagaatctctggcaacaccaggatgcaattttgtgctgctcattgaagtcgctgccagttttcatttttgctaataaggccggactcgacatgctggagacaacattagttgcattacaggacatttctctagataagatatttgatgaatccggaaggaaagtgttgctctcagaatttgccaagattatggaacagggtttcgcgtgtttgcctggtggtatctgcatgtcaacaatgggacgacatatttcatatgaacaagctatcgcgtggaaagtgtttgcgtcgtctgaagaaaatgctgtccactgtttggccttttcgtttatcaactggtcattcgtgtaa

SEQ ID NO: 231 - protein, 841 aa, Lycopersicon esculentum
MAMVAQQHRESSSGSITKHLDSSGKYVRYTAEQVEALERVYAECPKPSSLRRQQLIRECHILSNIEPKQIKVWFQNRRCREKQRKESSRLQTVNRKLSAMNKLLMEENDRLQKQVSQLVCENGYMRQQLQSVSAATTDVSCESVVTTPQHSLRDANNPAGLLPIAEETLAEFLSKATGTAVDWVPMPGMKPGPDSVGIFAISHSCSGVAARACGLVSLEPTKIADILKDRPSWFRDCRNVEVITMFPAGNGGTVELLYTQIYAPTTLAPARDFWTLRYTTTLDNGSLVVCERSLSGNGPGPNPTAASQFVRAQMLPSGYLIRPCDGGGSIIHIVDHLNLEAWSAPEILRPLYESSKVVAQKMTIAALRYARQLAQETSDEVVYGLGRQPAVLRTFSQRLCRGFNDAINGFGDDGWSMLSSDGAEDVIVAVNSRKNLATTSIPLSPLGGVLCAKASMLLQNVPPAVLVRFLREHRSEWADFNVDAFVASALKSCPYTYPGMRPTRFTGSQIIMPLGHTIEHEEMLEVIRLEGHSIGQEDAFMPRDIHLLQMCSGTDENAVGACSELVFAPIDEMFPDDAPLLPSGFRVIPLESKSGDAQDTLNAHRTLDLASSLEVGPATNSTTGDAASCYSARSVLTIAFQFPFEDNLQDNVATMARQYVRSVVSSVQRVAMAISPTGMNPTLGAKLSPGSPEAVTLSHWICQSYSYHMGTELLRADSSGDESVLKNLWQHQDAILCCSLKSLPVFIFANKAGLDMLETTLVALQDISLDKIFDESGRKVLLSEFAKIMEQGFACLPGGICMSTMGRHISYEQAIAWKVFASSEENAVHCLAFSFINWSFV

SEQ ID NO: 232 - DNA, 258 bp, Saccharum officinarum
atgaggatgttcttccggcacttgctatcttgcatcctcctgctcttgctaatgtcacacttgccaagcccgatcctcggcttgagaacattgagaggagaggaggcgaagagcgacttgaggcgccatgagcatgagcttccgccagcggtatctccttcaaaagaggtggacaacgatgacgctgccgcctccagtaagttcacagtttcaagaagaatggttcctcaaggtccaaaccctctccacaacagatga

SEQ ID NO: 233 - protein, 85 aa, Saccharum officinarum
MRMFFRHLLSCILLLLLMSHLPSPILGLRTLRGEEAKSDLRRHEHELPPAVSPSKEVDNDDAAASSKFTVSRRMVPQGPNPLHNR

SEQ ID NO: 234 - DNA, 53 bp, Artificial sequence
  primer: prm05843
ggggacaagtttgtacaaaaaagcaggcttaaacaatgaggatgttcttccgg

SEQ ID NO: 235 - DNA, 49 bp, Artificial sequence
  primer: prm05844
ggggaccactttgtacaagaaagctgggttcctctcatctgttgtggag

SEQ ID NO: 236 - DNA, 668 bp, Oryza sativa
ccttctacatcggcttaggtgtagcaacacgactttattattattattattattattattattattttacaaaaatataaaatagatcagtccctcaccacaagtagagcaagttggtgagttattgtaaagttctacaaagctaatttaaaagttattgcattaacttatttcatattacaaacaagagtgtcaatggaacaatgaaaaccatatgacatactataattttgtttttattattgaaattatataattcaaagagaataaatccacatagccgtaaagttctacatgtggtgcattaccaaaatatatatagcttacaaaacatgacaagcttagtttgaaaaattgcaatccttatcacattgacacataaagtgagtgatgagtcataatattatttttcttgctacccatcatgtatatatgatagccacaaagttactttgatgatgatatcaaagaacatttttaggtgcacctaacagaatatccaaataatatgactcacttagatcataatagagcatcaagtaaaactaacactctaaagcaaccgatgggaaagcatctataaatagacaagcacaatgaaaatcctcatcatccttcaccacaattcaaatattatagttgaagcatagtagtagaatccaacaaca

SEQ ID NO: 237 - protein, 14 aa, Artificial sequence
  CLE domain, consensus sequence
  VARIANT (1)..(1): /replace="Glu" /replace="Arg" /replace="Met" /replace="Pro" /replace="Leu
  VARIANT (2)..(2): /replace="Glu" /replace="Asp" /replace="Arg" /replace="Ser"
  VARIANT (4)..(4): /replace="Ile" /replace="Leu" /replace="Arg" /replace="Phe" /replace="Gln" /replace="Val" /replace="Met"
  VARIANT (5)..(5): /replace="Ile" /replace="Ser" /replace="Leu"
  VARIANT (6)..(6): /replace="Pro" /replace="Leu" /replace="Arg"
  VARIANT (7)..(7): /replace="Thr" /replace="Gln" /replace="Cys" /replace="Asn" /replace="Gly" /replace="Lys" /replace="Ser"
  VARIANT (8)..(8): /replace="Gly"
  VARIANT (9)..(9): /replace="Pro"
  VARIANT (10)..(10): /replace="Asn" /replace="Tyr"
  VARIANT (12)..(12): /replace="Leu" /replace="Gln" /replace="Arg" /replace="Tyr" /replace="His"
SKRKVPRNSDPIHH

SEQ ID NO: 238 - protein, 14 aa, Artificial sequence
  CLE domain, consensus sequence
  VARIANT (1)..(1): /replace="Pro"
  VARIANT (2)..(2): /replace="Glu" /replace="Lys"
  VARIANT (4)..(4): /replace="Leu" /replace="Ile"
  VARIANT (5)..(5): /replace="Ser" /replace="Ile"
  VARIANT (7)..(7): /replace="Gly" /replace="Cys" /replace="Thr" /replace="Ser"
  VARIANT (10)..(10): /replace="Asp"
  VARIANT (12)..(12): /replace="Gln" /replace="His"
  VARIANT (14)..(14): /replace="Asn"
SRRMVPQGPNPLHH

SEQ ID NO: 239 - DNA, 477 bp, Populus trichocarpa x Populus deltoides
gcaaattccccctgctctaaaatccattttcctatctatcaacctctctggtctctatatccccaccattttcatcatgaggaataaaaatcctcagctgttccttattttcctgatagtgttcctggtactcgttcatggcaccacttgccgcgatgccaaaagatctactagcaatggagaaacagtacaagggtcgaaaaccaaacattcttcaatgtttctacaagcgctttcttccatttttaaggcttcagaatccagcactaacaacatcaaggcacttcacaccgtctcgcgcaggcttgttccttgtggaccaaacccactccacaactgatcatcgaatcaacaaaattccaatctgtttccatttgttgaaatatatatagtgtttttaaaatatttttgttgaataatctatacatattttccctatacatccagttttgaaaaaagaaaaaaaaaaaaaaaaaa

SEQ ID NO: 240 - protein, 87 aa, Populus trichocarpa x Populus deltoides
MRNKNPQLFLIFLIVFLVLVHGTTCRDAKRSTSNGETVQGSKTKHSSMFLQALSSIFKASESSTNNIKALHTVSRRLVPCGPNPLHN

SEQ ID NO: 241 - DNA, 443 bp, Oryza sativa
tctctctctctcacacacacacacacacaaactagagacttatgccatgaggaggttctccaagcagcacctggtccctttcattctgctcctgctacttgtcatgtctcacttgccaatctcaagccttggttcaaggagagcattcagagaagaagctgtcagtggtttcagaagccatgagcttgctccaaccatggctccttctcaagagaaagaagcaggcgtcgtcgccggcgccggtagcatctgtggccagaagtatgctgtctcaagaagaatggttcctcagggaccaaaccctctccacaactgatgaactcatgcactgcaatctgccgtgatcatcagcttctccaatacaggtgaatggtgcagccatcattggttacctttaagtccgtctgcttaattaactagatatttcatagtattttatcaca

SEQ ID NO: 242 - protein, 89 aa, Oryza sativa
MRRFSKQHLVPFILLLLLVMSHLPISSLGSRRAFREEAVSGFRSHELAPTMAPSQEKEAGVVAGAGSICGQKYAVSRRMVPQGPNPLHN

SEQ ID NO: 243 - DNA, 677 bp, Saccharum officinarum
tttgaaactgttacaactggttcgcctgcacctgcctgcccggaacgacccacgcgtccgcgctctctctctccctctccctctacctctctctaacatatgccatgaggatgttcttccggcactagctatcttgcatcctactgctctaggtaatgtcacacttgccaagctcgatcctcggcttgagaacatcgagaggagaggaggcgaagagcgacttgaggcgccatgagcatgagcttccgccagccgtatctccttcaaaagaggtggacaacgacgacgctgccgccgccagtaagttaacagtttcaagaagaatggttcctcaaggtccaaaccctctccacaacagatgagaggatcggagcagcatgctgctgctgcttctggtatggtcttcagccaaggtagcagctagctagctcttctcagtctcagctaatggtgtagtgagtggcacgcactcaacaaagtacccttcctctctttcctttttttttaacccgtcatatgaatgatacaaatggatgcatatataagttgaatactacttcccatgtaatgtgtttttgttgcattgatttcatttataggcagctttgtacatagatttttatgatattaaggtgtaaaagttgttgtgctagatggatctagattttgaatgtttg

SEQ ID NO: 244 - protein, 68 aa, Saccharum officinarum
MSHLPSSILGLRTSRGEEAKSDLRRHEHELPPAVSPSKEVDNDDAAAASKLTVSRRMVPQGPNPLHNR

SEQ ID NO: 245 - DNA, 533 bp, Arabidopsis thaliana
gcaacgagaaaaaccgtccttggtgacaactcatgcttgcactcaagccttaagctagctaaacctatctcgcgcactactagaattcaaataaaactctataaatagaaaccctcatgagatctcttctttcctcatatacactcatacacaccacgtgaacaatctatctctctttctattgcttttctatatatacagaaactaattaattgtatctgtaatggctaagttaagcttcactttctgcttcttgttgtttcttctgttatcctcaatcgccgctggaagccgccctcttgagggggctcgggtcggggtgaaggtgagaggcctaagcccttctatcgaggctacgagtccgactgtagaggatgatcaagctgcgggtagccatgggaaatctccagagcggttaagcccaggaggacccgacccacaacatcactagttattttgtgtttttcaatttcttcgacatgtttattacttatcaataatttggttgcaacgaagctgtttttcttttttgt

SEQ ID NO: 246 - protein, 75 aa, Arabidopsis thaliana
MAKLSFTFCFLLFLLLSSIAAGSRPLEGARVGVKVRGLSPSIEATSPTVEDDQAAGSHGKSPERLSPGGPDPQHH

SEQ ID NO: 247 - DNA, 417 bp, Brassica napus
ctttcatattgtatctcccgcagccaaacaaaaactttttttttgacaaagatagaacatgaagatcaagagtttgatattggcttcctcttttctgattcttgccttcattcatcactcagaatcagcttcatttcggagtttgctgatgaagaatggattgtacgaagaagaagaagcaaaaattctattgggcgactccaaagaaacgataactaattctacagctttggagtctaaacggataattccgacgggtccaaatccacttcacaacaggtaactttgatcatttaagaacaagatatgttgtgagtatgtctcttcctctgtttttgttacaagtatctatcttactgtgtaatgtaatggtgaatgtataatacattttctaattaaattaccttatttaaaaaa

SEQ ID NO: 248 - protein, 74 aa, Brassica napus
MKIKSLILASSFLILAFIHHSESASFRSLLMKNGLYEEEEAKILLGDSKETITNSTALESKRIIPTGPNPLHNR

SEQ ID NO: 249 - DNA, 774 bp, Arabidopsis thaliana
aacagtttctatatttctctctgtatctctctcactcagtcactttctctctaaaaaatggattctaaaagctttgtgctactactactactcttctgcttcttgttccttcatgatgcttctggtctcactctctctttcactcctctatatgtctataacccatgtaaatggattcttataagtctcaacataacttttttttgttatttactatttcaccagatctcactcaagctcatgctcacgttcaaggactttccaaccgcaaggttatcttcaacttgtactcattaaggcctctcagcattcatgtgttatgttcatgtagatgtccggtccagttcaacaactgtttcattgctttagttgtcacgagaaatatttgtatatattattatggtgtgcaaaacatagtaaaatgttgttcaattggcagatgatgatgatgaaaatggaaagtgaatgggttggagcaaatggagaagcagagaaggcaaagacgaagggtttaggactacatgaagagttaaggactgttccttcgggacctgacccgttgcaccatcatgtgaacccaccaagacagccaagaaacaactttcagctcccttgacctaatctcttgttgctttaaattatttcatattgtaaattactttctgctttatcggttttaccatttcgggagtcttttttgtgtgcaatctgtttcgtttggtgtagtttcatgaaagtgaatgtaagatatgcattacgtttgttgctgaagtg

SEQ ID NO: 250 - protein, 96 aa, Arabidopsis thaliana
MDSKSFVLLLLLFCFLFLHDASDLTQAHAHVQGLSNRKMMMMKMESEWVGANGEAEKAKTKGLGLHEELRTVPSGPDPLHHHVNPPRQPRNNFQLP

SEQ ID NO: 251 - DNA, 353 bp, Oryza sativa
atggaaggtgtaggtgctaggcagaggaggaaccctctgatacccagaccaaacggttcaaagaggcatctgcagcatcagcatcagccaaatgctgccgagaagaagaccgccgcgacatcgaattacttcagtatcgaggcgttcctcgtgctcgtcttcctcaccatgtcattgctcatacttccattggtgcttcccccattgcctccgccgccatcgctgctgctgctgctgccagtctgcctgctcatcctgctggttgtgctggccttcatgccaacggatgtgcggagcatggcttcctcttacttgtaaatacatctcctaggggaatttatttttgtttttga

SEQ ID NO: 252 - protein, 105 aa, Oryza sativa
MEGVGARQRRNPLIPRPNGSKRHLQHQHQPNAAEKKTAATSNYFSIEAFLVLVFLTMSLLILPLVLPPLPPPPSLLLLLPVCLLILLVVLAFMPTDVRSMASSYL

SEQ ID NO: 253 - DNA, 56 bp, Artificial sequence
  primer: prm08170
ggggacaagtttgtacaaaaaagcaggcttaaacaatggaaggtgtaggtgctagg

SEQ ID NO: 254 - DNA, 51 bp, Artificial sequence
  primer: prm08171
ggggaccactttgtacaagaaagctgggtcaaaaacaaaaataaattcccc

SEQ ID NO: 255 - DNA, 2193 bp, Oryza sativa; identical to SEQ ID NO: 5

SEQ ID NO: 256 - protein, 3 aa, Artificial sequence
  conserved motif 1a
YFS

SEQ ID NO: 257 - protein, 3 aa, Artificial sequence
  conserved motif 1b
YFT

SEQ ID NO: 258 - protein, 3 aa, Artificial sequence
  conserved motif 1c
YFG

SEQ ID NO: 259 - protein, 3 aa, Artificial sequence
  conserved motif 1d
YLG

SEQ ID NO: 260 - protein, 7 aa, Artificial sequence
  conserved motif 2
  VARIANT (1)..(1): /replace = "Ala" /replace = "Ile"
  VARIANT (7)..(7): /replace = "Ser"
VLAFMPT

SEQ ID NO: 261 - protein, 3 aa, Artificial sequence
  conserved motif 3
  VARIANT (1)..(1): /replace = "Pro"
SYL

SEQ ID NO: 262 - protein, 178 aa, Oryza sativa
MYLLSPRNGDEEDEQEEIQELISDDEPPNLKLASCATAASSSSSSGSDMEKGRGKACGGGSTAPPPPPPSSSGKSGGGGGSNIREAAASGGGGGVWGKYFSVESLLLLVCVTASLVILPLVLPPLPPPPSMLMLVPVAMLVLLLALAFMPTTTSSSSSAGGGGGGGRNGATTGHAPYL

SEQ ID NO: 263 - protein, 126 aa, Oryza sativa
MLLEHLMITMEEQMFREQQMQRGGRHHQHHTTREQEQQQKQQQRRRLMNNATNGGGGDGGSRCYFSTEAILVLACVTVSLLVLPLILPPLPPPPTLLLLLPVCLLALLVVLAFMPTDMRTMASSYL

SEQ ID NO: 264 - protein, 105 aa, Zea mays
  UNSURE (65)..(75): Xaa can be any naturally occurring amino acid
MASRSSAMEGGAAIQRRNAVKRHLQQRQQEADFLDKKVIASTYFSIGAFLVLACLTVSLLILPLXXXXXXXXXXXLLWLPVCLLVLLVVLAFMPTDVRSMASSYL

SEQ ID NO: 265 - protein, 110 aa, Triticum aestivum
MDSQFGALERGGSRQRRSPVLARPNTTKRHIQQQRANAADKKVVMPNYFSIEAFFVLACLTVSLLILPLVLPPLPPPPSLLLFVPVCLLILLMVLAFMPTDMRSMATSYL

SEQ ID NO: 266 - protein, 110 aa, Hordeum vulgare
MDSQFGAMDRGGSRQRSSPVLARPNTAKRQMQQQRANAADKKVVIPNYFGVEAFFVLACLTVSLLILPLVLPPLPPPPSLLLLLPVCLLILLMVLAFMPTDVRSMATSYL

SEQ ID NO: 267 - protein, 99 aa, Saccharum officinarum
  UNSURE (62)..(62): Xaa can be any naturally occurring amino acid
MEGGGQIQRRNNAVKRHLQQRQQEADFLDKKVIASTYFSIEAFLVLACLTVSLLILPLVLPXLPAPASLLLWLPVWLLELLIVLAFMPTDVRSMASSYL

SEQ ID NO: 268 - protein, 99 aa, Saccharum officinarum
MEGGGQIQRRNNAVKRHLQQRQQEADFLDKKVIASTYFSIEAFLVLACLTVSLLILPLVLPPLPPPPSLLLWLPVCLLILLIVLAFMPTDVRSMASSYL

SEQ ID NO: 269 - protein, 107 aa, Sorghum bicolor
MASRSSALEGGGAAIQRRNNAVKRHLQQRQQEADFHDKKVIASTYFSIGAFLVLACLTFSLLILPLVLPPLPPPPSLLLWLPVCLLVLLVVLAFMPTDVRSVAASYL

SEQ ID NO: 270 - protein, 130 aa, Arabidopsis thaliana
MIREISNLQKDIINIQDSYSNNRVMDVGRNNRKNMSFRSSPEKSKQELRRSFSAQKRMMIPANYFSLESLFLLVGLTASLLILPLVLPPLPPPPFMLLLVPIGIMVLLVVLAFMPSSHSNANTDVTCNFM

SEQ ID NO: 271 - protein, 135 aa, Arabidopsis thaliana
MIREFSSLQNDIINIQEHYSLNNNMDVRGDHNRKNTSFRGSAPAPIMGKQELFRTLSSQNSPRRLISASYFSLESMVVLVGLTASLLILPLILPPLPPPPFMLLLIPIGIMVLLMVLAFMPSSNSKHVSSSSTFM

SEQ ID NO: 272 - protein, 139 aa, Vitis vinifera
MSIEQPEADSRLSEGPLINLQDRYLSGIMEARGRRNSAPLQVERKNPTPPMAEGKKMEYNRTPLSRENSRRLIPASYFSLESLLLLICLTASLLILPLILPPLPPPPFMLLLLPIGILAVLMILAFMPSNVRDLTYTYV

SEQ ID NO: 273 - protein, 126 aa, Citrus sp.
  UNSURE (103)..(103): Xaa can be any naturally occurring amino acid
MNSDNSESRQRLSKGIINLQDRYPTSIMDRGVRKIATPPVEKRKVEYHRSYSQGASRKLFSASYFTLESLLLLVCLTASLLILPLVLPPLPPPPFLLLLVPIXILAVLLVLAFMPSNVRDITSTYV

SEQ ID NO: 274 - protein, 118 aa, Lycorpersicon esculentum
MNMDMESSEAKLRSSKGFINLEEHQQYFNNIMEGNKMEHKRSFTQGHGKKMLSMNYFSLESIILLLGLTASLLLLPLMLPPLPPPPFMLLLVPIFILVVLMILAFMPSNVRNVTCSYL

SEQ ID NO: 275 - protein, 87 aa, Lycorpersicon esculentum
MEGNKMEHKRSFTQGHGKKMLSMNYFSLESIILLLGLTASLLLLPLMLPPLPPPPFMLLLVPIFILVVLMILAFMPSNVRNVTCSYL

SEQ ID NO: 276 - protein, 106 aa, Arabidopsis thaliana
MDVGRNNRKNMSFRSSPEKSKQELRRSFSAQKRMMIPANYFSLESLFLLVGLTASLLILPLVLPPLPPPPFMLLLVPIGIMVLLVVLAFMPSSHSNANTDVTCNFM

SEQ ID NO: 277 - DNA, 537 bp, Oryza sativa
atgtacttgttgagcccaagaaatggcgacgaggaggacgaacaggaggaaatccaggagctgatcagcgacgacgagccgcccaatctcaagttggcatcctgcgccactgcagccagcagcagcagcagcagcggcagcgacatggagaagggaagaggtaaagcctgcggcggcgggagtacggcgccgccgccgccgccgccgtcgtcgtcaggtaaatccggcggcggcggcggcagcaatatcagggaggcggcggctagcggcggcggcggcggcgtgtggggcaagtacttctcggtggagtcgctgctcctgctggtgtgcgtgacggcgtcgctggtgatcctcccgctcgtgctgccgccgctgcccccgccgccgtcgatgctgatgctggtgccggtggcgatgctggtgctgctgctggcgctggcgttcatgccgacgacgacgtcgtcgtcgtcgtccgccggcggcggcggcggcggcggccgcaatggggcgacgacgggacatgctccctacttgtag

SEQ ID NO: 278 - DNA, 538 bp, Zea mays
  misc_feature (177)..(208): n is a, c, g, or t
  misc_feature (493)..(493): n is a, c, g, or t
ttcacattacactcatgactcgtcttaggacgaatcctgcagctgcaaaacacagaaaatctggccaagacctatttatctatttacaggtaagaggaggccatgctgcgcacatctgtcggcatgaaggccagtacaaccagcaagacgagcaggcagaccggcagccacagcagnnnnnnnnnnnnnnnnnnnnnnnnnnnnnnnnccagcggcagtatcagcagcgagacggtgaggcaggcgagcacgaggaatgccccgatgctgaagtaggtggacgcgatgaccttcttgtcgaggaaatccgcctcctgctgacgctgctgcagatgccgcttcacggcattcctcctttgtattgccgcccctccttccatcgcgctagatcggcttgccatgtgttctttggtgtaggcggaggtggagaccagtcgcagtgagtggttgccaaagtaagcaagaagtgaaaggcggtgtagaaccgccttgngttttctgaacgttttgtaatcagatctgagctcgggtggtcgaa

SEQ ID NO: 279 - DNA, 578 bp, Vitis vinifera
tttttttttttttttttaatcaagaaataaaataactgattttcatctgaatatcaagacaaataacaaaaattgtatgatgagaagaggtgcacttttgaacaccaccatttacacatatgtataagtcaaatctctgacattagaaggcatgaaagccaagatcataagcactgctagaatgccaatggggagcagaagcagcatgaaaggagggggtggcaatggtggtagtatcaggggaaggatcagcaatgaagccgtgagacagatgagcaaaagcaatgactccaagctgaaatagcttgctgggatcagtctcctgctgttctctcgtgagaggggagttctattatattccatcttctttccttcggccataggaggagtagggtttttcctctcaacttgcagaggagcagagttcctccttcctctcgcttccatgatgccactcaaatatcgatcttgcagattgatcaaaggtccttcagacagtcttgaatctgcttcaggctgctcaatactcatttaaatttctcctttaccggtcaccaagttccaaccggttcaaagta

SEQ ID NO: 280 - DNA, 704 bp, Citrus reticulata
  misc_feature (619)..(619): n is a, c, g, or t
agggtttcttcaaagataggtagccatttgcacatttgaatctgcttgttggatattgtcaaggaggctgttggaattaggccacatttcagaatctggtttcatcctggatcgctgggcatttgaaggcattttgtgatcatcgctgtttaaaatttggccgcatattagaatctgggttctcatcggttttccgtacatttaccttgaccacattttgatatctgggttgagctgcattttagccttcgtatttaaaaggacttgatctaatctggggtcttggtgagccggggcaactgatcatagtaaatgaattctgataattctgagtcgagacagagactatcaaagggcattataaacttgcaagatcgatatccgaccagcattatggatcgtggtgtaagaaaaattgcaactcctccggtcgagaagaggaaagttgagtatcaccgaagttactcgcaaggggcatccagaaaactgttttcggcaagctatttcaccctggaatcattgcttttgctcgtatgtctgacggcctcattgctgatcctgccattggtgcttccgcccttgccgcccccgccattcctgctgcttctggttcctatangtattctagccgtgcttttggtcttggcattcatgccttctaatgtaagagatataacttccacgtacgtgtaaatggtgttgct

SEQ ID NO: 281 - DNA, 382 bp, Lycorpersicon esculentum
gaaaaaaatgtatttaatcattatgtaaaaaacaagtgaatctactttgatattttcttctaaattaaaccacacaattaaagatatgagcaagtcacattcctaacattagaaggcataaaagctaagatcataagaacaacaagaatgaaaattgggactaacaacaacataaaaggtggtggtggcaatggtggaagcatcaatggcaaaagtaacaaagatgctgtaagaccaagtaacaaaataattgactctaagctaaaataattcattgacaacattttcttgccatgtccttgtgtaaatgatctcttatgctccatcttattgccttccataatgttgttgaaatattgttgatgttcctccaaattaataa

SEQ ID NO: 282 - DNA, 624 bp, Lycorpersicon esculentum
tttgttaaagattggcacattttcaagttcagtattcattcgatttttgatatctacataaaaaaaaagtgtcctggtactactcaatattcctcagaacgacttcatattcaggtctcgaattcaaaacctcacatcaagattcttaggaaatttcaagattggttgaaaaactcatatccttctctaagtttcaagattggttccaaattaaaactcgagacttctgagtaagagcgtacgactagtaatgaacatggacatggaatcatcagaggcaaaattgagatcatcaaaagggtttattaatttggaggaacatcaacaatatttcaacaacattatggaaggcaataagatggagcataagagatcatttacacaaggacatggcaagaaaatgttgtcaatgaattattttagcttagagtcaattattttgttacttggtcttacagcatctttgttacttttgccattgatgcttccaccattgccaccaccaccttttatgttgttgttagtcccaattttcattcttgttgttcttatgatcttagcttttatgccttctaatgttaggaatgtgacttgctcatatctttaattgtgtggtttaattta

SEQ ID NO: 283 - DNA, 1130 bp, Oryza sativa
catgcggctaatgtagatgctcactgcgctagtagtaaggtactccagtacattatggaatatacaaagctgtaatactcgtatcagcaagagagaggcacacaagttgtagcagtagcacaggattagaaaaacgggacgacaaatagtaatggaaaaacaaaaaaaaacaaggaaacacatggcaatataaatggagaaatcacaagaggaacagaatccgggcaatacgctgcgaaagtactcgtacgtaaaaaaaagaggcgcattcatgtgtggacagcgtgcagcagaagcagggatttgaaaccactcaaatccaccactgcaaaccttcaaacgaggccatggtttgaagcatagaaagcacaggtaagaagcacaacgccctcgctctccaccctcccacccaatcgcgacgcacctcgcggatcggtgacgtggcctcgccccccaaaaatatcccgcggcgtgaagctgacaccccgggcccacccacctgtcacgttggcacatgttggttatggttcccggccgcaccaaaatatcaacgcggcgcggcccaaaatttccaaaatcccgcccaagcccctggcgcgtgccgctcttccacccaggtccctctcgtaatccataatggcgtgtgtaccctcggctggttgtacgtgggcgggttaccctgggggtgtgggtggatgacgggtgggcccggaggaggtccggccccgcgcgtcatcgcggggcggggtgtagcgggtgcgaaaaggaggcgatcggtacgaaaattcaaattaggaggtggggggcggggcccttggagaataagcggaatcgcagatatgcccctgacttggcttggctcctcttcttcttatcccttgtcctcgcaaccccgcttccttctctcctctcctcttctcttctcttctctggtggtgtgggtgtgtccctgtctcccctctccttcctcctctcctttcccctcctctcttcccccctctcacaagagagagagcgccagactctccccaggtgaggtgagaccagtctttttgctcgattcgacgcgcctttcacgccgcctcgcgcggatctgaccgcttccctcgcccttctcgcaggattcagcc

SEQ ID NO: 284 - protein, 77 aa, Medicago sativa
MVRCFSLGSVLILIALAASMVVLPLMLPPLPPPPLALLFFPVGIMAALVVLAFSPSENVKNVVVYSSSSSGIANSKR

SEQ ID NO: 285 - protein, 78 aa, Medicago sativa
MIMVASKEKTNSGGCMFRYSVLILSLLALSILVLPLVMPPLPPPPLLLLLVPVFIMLLLFFIAFSPSKKVPNKASFVS

SEQ ID NO: 286 - DNA, 613 bp, Hordeum vulgare
cttccgagaaagatgcttcatattgcactcatcttatgccaacacacaatcagaaacaaaaaccacgcagcaagcctatttacaagtaagaggtggccatgctccgcacatcagtcggcatgaaggccagcaccatcaacaggatgagcaagcagaccggcaagagcagcagtagcgatggcggtgggggcaacggaggcagcaccaatggcagtatgagcaatgaaacggtgaggcaggcgagcacgaagaacgcttcgacgccgaagtagttcggtatgacaaccttcttgtcagcagcatttgccctctgctgctgcatttgcctctttgcagtatttggtctggctaacacagggctgctcctctgcctactaccgcctctgtccattgcaccgaactggctatccatctattctttggtgagtgcagatcagcggctatccaggaactgagatgaataagaacttgtggaatctgaaggtttttaacagatctgaagtctttgtgagtccgtgactgaactgcagatcatctgctgtggaagaactgcaccgcaagtggcaataccttcgatcctgaaacttgcattttggtgatgcccgtaccacgc

SEQ ID NO: 287 - DNA, 617 bp, Saccharum officinarum
  misc_feature (451)..(451): n is a, c, g, or t
ggagaacgtgcttgttcaggtggttcaacagtgcggaccagagaacaatgcgaggttcaggattaaaggtattctggcttcagaggcagttcttccaaagcaagtgacaggcgattccatcaccggagctaagatcttattacaacattcagaaacacaggagtcctcccaccgcctttcacttcttgcttacttctgcaaccactcgccgtgactgatctccacgcacaccaaagaacacaacacgtggcaagccgatctagcgcgatggaaggaggggggcaaatacagaggaggaataatgccgtgaagcggcacctgcagcagcggcagcaggaggcggatttcctcgacaagaaggtcatcgcgtccacctatttcagcatcgaggcgttcctcgtgctcgcctgcctcaccgtctcgctgctgatactgccgcttgtgctgccgncgctgccggcgccggcgtcgctgctgctgtggctgccggtctggctgctcgaactgctgattgtgcttgccttcatgccgacagatgtgcgcagcatggcctcctcttacttgtaaaaaaatagataaataggccacctttggcaattttctggggtttggaggtg

SEQ ID NO: 288 - DNA, 638 bp, Saccharum officinarum
gattttttccaagccagtgaccggcgattcatcaaccggagctgagatcttatacaacattcagaaacacaggagtcctcgcaccgctttccactcttggctaattttgcaaccactcgccgtgactgatctccacgcacaccaaagaacacaacacgtggcaacccgatctagcgcgatggaaggaggggggcaaatacagaggaggaataatgccgtgaagcggcacctgcagcagcggcagcaggaggcggatttcctcgacaagaaggtcatcgcgtccacctatttcagcatcgaggcgttcctcgtgctcgcctgcctcaccgtctcgctgctgatactgccgctggtgctgccgccgctgccgccgccgccgtcgctgctgctgtggctgccggtctgcctgctcatcctgctgattgtgctggccttcatgccgacagatgtgcgcagcatggcctcctcttacttgtaataaatagataaataggccaccttggtcaatattctgtgatttggaggtgattcgtcctgagatgagtctcgattgatgtcagctactcccaaggggaaatgcatgtaacacttggtggccgacggtggcaagataatcatgctaccatgtcagttaaacc

SEQ ID NO: 289 - DNA, 778 bp, Sorghum bicolor
gctgttggtgttgttcttgagatctctttcttgatcttgtgtgggattaaagagggattcttgccttcctacgggagaaagagaaaaggggaagaacgtgcttgttccggtggttcaacagtgcggagacccggagaacaatgcgaggttcaggattaaaggtgttctggcttcaggtgcagttcttccaaagcaggtgacaggcgattcgatcaccggagctcagatctgacgaaaacaaaacacagtcctcctcccaccgcctttcagttcttgcttacttctgcaaccactcactgcgaccgtacaccaaagaacactgcacatggcaagccgatctagcgcgctggaaggagggggggcagcaatacagcggaggaataatgccgtgaagcggcacctgcagcagcggcagcaggaggcggatttccacgacaagaaggtcatcgcgtccacctacttcagcatcggcgcgttcctggtgctcgcctgcctcaccttctcgctgctcatcctgccgctggtgctgccgccgctgccgccgccgccgtcgctgctgctgtggctgccggtctgcctgctcgtcctgctggttgtgctggccttcatgccgacagatgtgcgcagcgtggcggcctcttacttgtaaatagccagataaataggccaccacctttggccagttttctgtgttttcgggggtgattcgtcctaagatgagtcatgatcgagtgtaatgtgaagcatcttttccaggggtagtagatttcaatgaagt

SEQ ID NO: 290 - DNA, 732 bp, Arabidopsis thaliana
ttgtcttcctcatttccctactagtacttgtttcacacagtttcttgatccaaccaaaaccaatacacaaagcttctcaaactccttcacctcaaagcttcttcctttacatctgaatcgttgagttaactcggatttgttctgcatcctctgtttctgaatcgtgggccatccttattttgtctcgaattcttcaccaattgcttcgatcaagctgcattggttaaccagttgccctaaagatcagatctttgagcaaaattttgtcactgatcttctaaatccaaaccagacacagcaaaacaacctctgtagatgattcgagaaatctcaaacttacaaaaagatattataaacattcaagacagttattcgaacaaccgagtcatggacgtcggaagaaacaaccggaaaaacatgagctttcgaagttcgccggagaaaagcaagcaagagttacggcggagtttctcggcgcagaaaaggatgatgatcccggcgaattatttcagtttagagtctctgttcctattggttggtctaacggcatctctgttaatacttccgttagttttgccgccgttacctccgcctccgtttatgctgctattggttcccattgggattatggttttactcgtcgttcttgccttcatgccttcttctcattctaatgctaatacagatgtaacttgcaatttcatgtaaatctgaaatttattatatgatgat

SEQ ID NO: 291 - DNA, 891 bp, Arabidopsis thaliana
cccactttatttcttcttctctggttttcttaccaaaagaaactttcttcgtcttcctctgtatttaagctttaacaccctgtttttggtttccaacgttcaatcttcatcttcttctcgctgaaggtgtgtttggctctaacggtttaaagctttcttgaaacaccaattgaatcttttctctctaccggcaaaaaaaaaagattagtccttttaggtctggaaacgccaagatcactcgttctaaaccttagattttgtctgcatttcgggataatcatttcatcgtcagggttcttcaaccaaactacatttacagaagaagaagaagaagaaaagttcgttactttttatgcgtttggataaacaaactcaagtttcttcttcatacatcgatctgattttccagatcaaacttcgaaaagagaaaaagccttctttaaatgattcgtgagttctccagtctacaaaacgacatcataaacattcaagaacattattctctcaacaacaacatggacgtgagaggagatcataaccggaaaaacacgagttttcgtggttcagctccagctccgattatggggaagcaagaattgtttcggacattgtcgtcgcagaacagtccaaggaggctaatatcagcgagttacttcagtttagaatcaatggttgtgcttgttggtctcacagcatctctcttgatcttaccgttgattcttccaccattgcctcctcctccttttatgctgcttttgattcctattgggattatggttttgcttatggttcttgctttcatgccttcttctaattccaaacatgtttcttcttcttccacttttatgtaataaacgtttctttaattgaagaaagaaatccttaaacaaa

SEQ ID NO: 292 - DNA, 732 bp, Arabidopsis thaliana; identical to SEQ ID NO: 290

SEQ ID NO: 293 - DNA, 1130 bp, Oryza sativa
catgcggctaatgtagatgctcactgcgctagtagtaaggtactccagtacattatggaatatacaaagctgtaatactcgtatcagcaagagagaggcacacaagttgtagcagtagcacaggattagaaaaacgggacgacaaatagtaatggaaaaacaaaaaaaaacaaggaaacacatggcaatataaatggagaaatcacaagaggaacagaatccgggcaatacgctgcgaaagtactcgtacgtaaaaaaaagaggcgcattcatgtgtggacagcgtgcagcagaagcagggatttgaaaccactcaaatccaccactgcaaaccttcaaacgaggccatggtttgaagcatagaaagcacaggtaagaagcacaacgccctcgctctccaccctcccacccaatcgcgacgcacctcgcggatcggtgacgtggcctcgccccccaaaaatatcccgcggcgtgaagctgacaccccgggcccacccacctgtcacgttggcacatgttggttatggttcccggccgcaccaaaatatcaacgcggcgcggcccaaaatttccaaaatcccgcccaagcccctggcgcgtgccgctcttccacccaggtccctctcgtaatccataatggcgtgtgtaccctcggctggttgtacgtgggcgggttaccctgggggtgtgggtggatgacgggtgggcccggaggaggtccggccccgcgcgtcatcgcggggcggggtgtagcgggtgcgaaaaggaggcgatcggtacgaaaattcaaattaggaggtggggggcggggcccttggagaataagcggaatcgcagatatgcccctgacttggcttggctcctcttcttcttatcccttgtcctcgcaaccccgcttccttctctcctctcctcttctcttctcttctctggtggtgtgggtgtgtccctgtctcccctctccttcctcctctcctttcccctcctctcttcccccctctcacaagagagagagcgccagactctccccaggtgaggtgagaccagtctttttgctcgattcgacgcgcctttcacgccgcctcgcgcggatctgaccgcttccctcggccttctcgcaggattcagcc

1.-156. (canceled)

157. A method for increasing abiotic stress resistance in plants relative to control plants, comprising modulating expression in a plant of a nucleic acid encoding a Seed Yield Regulator (SYR) polypeptide, which SYR polypeptide comprises a leucine rich domain, preceded by a conserved tripeptide motif 1 comprising one of SEQ ID NO: 256, 257, 258 or 259, and followed by a conserved motif 2 (SEQ ID NO: 260), wherein said increased abiotic stress resistance is increased nutrient uptake efficiency relative to control plants.

158. The method of claim 157, wherein the SYR polypeptide has, in increasing order of preference, at least 27%, 30%, 35%, 40%, 45%, 50%, 55%, 60%, 65%, 70%, 75%, 80%, 85%, 90%, 95% or more sequence identity to the polypeptide represented by SEQ ID NO: 252.

159. The method of claim 157, wherein the nucleic acid encoding a SYR polypeptide comprises the nucleic acid sequence of SEQ ID NO: 251, 277, 278, 279, 280, 281, 282, 286, 287, 288, 289, 290, or 291 or a portion thereof, or a sequence capable of hybridising with any one of said nucleic acid sequences.

160. The method of claim 158, wherein the nucleic acid encoding a SYR polypeptide comprises the nucleic acid sequence of SEQ ID NO: 251, 277, 278, 279, 280, 281, 282, 286, 287, 288, 289, 290, or 291 or a portion thereof, or a sequence capable of hybridising with any one of said nucleic acid sequences.

161. The method of claim 157, wherein said nucleic acid encodes an orthologue or paralogue of SEQ ID NO: 252, 262, 263, 264, 265, 266, 267, 268, 269, 270, 271, 272, 273, 274, or 275.

162. The method of claim 157, wherein the SYR polypeptide further comprises a conserved motif 3 (SEQ ID NO: 261).

163. The method of claim 157, wherein the nutrient uptake efficiency results in increased seed yield and/or increased biomass.

164. The method of claim 163, wherein the increased seed yield comprises at least increased total weight of seeds, Thousand Kernel Weight and/or increased number of filled seeds.

165. The method of claim 163, wherein the increased biomass is increased shoot biomass and/or increased root biomass.

166. The method of claim 157, wherein the increased nutrient uptake efficiency occurs under mild drought conditions.

167. The method of claim 157, wherein the modulated expression is effected by introducing and expressing in a plant a nucleic acid encoding a SYR polypeptide.

168. The method of claim 167, wherein the nucleic acid is operably linked to a constitutive promoter.

169. The method of claim 157, wherein the nucleic acid encoding a SYR polypeptide is of plant origin.

170. A method for making plants having increased abiotic stress resistance, comprising introducing into a plant or plant cell a construct comprising
(a) a nucleic acid encoding a SYR polypeptide,
a. wherein the SYR polypeptide comprises
i. a leucine rich domain, preceded by a conserved tripeptide motif I comprising one of SEQ ID NO: 256, 257, 258 or 259, and followed by a conserved motif 2 (SEQ ID NO: 260);
ii. a leucine rich domain, preceded by a conserved tripeptide motif 1 comprising one of SEQ ID NO: 256, 257, 258 or 259, followed by a conserved motif2 (SEQ ID NO: 260) and a conserved motif 3 (SEQ ID NO: 261); or
iii. a polypeptide having at least 27%, 30%, 35%, 40%, 45%, 50%, 55%, 60%, 65%, 70%, 75%, 80%, 85%, 90%, 95% or more sequence identity to the polypeptide represented by SEQ ID NO: 252; or
iv. the polypeptide sequence of SEQ ID NO. 252, 262, 263, 264, 265, 266, 267, 268, 269, 270, 271, 272, 273, 274, or 275; or
b. wherein the nucleic acid comprises the nucleic acid sequence of SEQ ID NO: 251, 277, 278, 279, 280, 281, 282, 286, 287, 288, 289, 290, or 291;
(b) one or more control sequences capable of driving expression of the nucleic acid sequence of (a); and optionally
(c) a transcription termination sequence,
and wherein one of the control sequences is a constitutive promoter and wherein the increased abiotic stress resistance is increased nutrient uptake efficiency relative to control plants.

171. The method of claim 168, wherein the constitutive promoter is a GOS2 promoter.

172. The method of claim 157, wherein the nucleic acid encoding a SYR polypeptide is from a monocotyledonous plant.

173. The method of claim 172, wherein the monocotyledonous plant is from the family Poaceae.

174. The method of claim 173, wherein the plant is Oryza sativa.
